(19) United States
(12) Patent Application Publication
(10) Pub. No.: US 2012/0115235 A1
(43) Pub. Date: May 10, 2012

(54) ENHANCED CELLULASE EXPRESSION IN S. DEGRADANS

(75) Inventor: Steven W. Hutcheson, Columbia, MD (US)

(73) Assignee: UNIVERSITY OF MARYLAND, College Park, MD (US)

(21) Appl. No.: 13/262,978

(22) PCT Filed: Apr. 6, 2010
(86) PCT No.: PCT/US2010/030075

§ 371 Date: Jan. 9, 2012

Related U.S. Application Data
(60) Provisional application No. 61/166,773, filed on Apr. 6, 2009.

(51) Int. Cl. C12N 1/21; C12N 15/74

(52) U.S. Cl. 435/471; 435/252.3

(57) ABSTRACT

The invention provides organisms and methods of using and making organisms with enhanced cellulase expression.

### RELATED APPLICATIONS

[0001] This application claims priority from U.S. Provisional Patent Application No. 61/166,773 filed on Apr. 6, 2009 and incorporated, herein, by reference in its entirety.

### FIELD OF THE INVENTION

[0002] The invention is generally directed to degradative enzymes and systems. In particular, the present invention is directed to plant cell wall degrading enzymes and associated proteins found in Saccharophagus degradans, systems containing such enzymes and/or proteins, and methods of using the systems to obtain biofuels such as ethanol.

### BACKGROUND OF THE INVENTION

[0003] Cellulases and related enzymes have been utilized in food, beer, wine, animal feeds, textile production and laundering, pulp and paper industry, and agricultural industries. Various such uses are described in the paper “Cellulases and related enzymes in biotechnology” by M. K. Bhat (Biotechnical Advances 18 (2000) 355-383), the subject matter of which is hereby incorporated by reference in its entirety.

[0004] The cell walls of plants are composed of a heterogenous mixture of complex polysaccharides that interact through covalent and noncovalent means. Complex polysaccharides of higher plant cell walls include, for example, cellulose (β-1,4-glucan) which generally makes up 35-50% of carbon found in cell wall components. Cellulose polymers self associate through hydrogen bonding, van der Waals interactions and hydrophobic interactions to form semi-crystalline cellulose microfibrils. These microfibrils also include noncrystalline regions, generally known as amorphous cellulose. The cellulose microfibrils are embedded in a matrix formed of hemicelluloses (including, e.g., xylans, arabinans, and mannans), pectins (e.g., galacturonans and galactans), and various other β-1,3 and β-1,4 glucans. These matrix polymers are often substituted with, for example, arabinose, galactose and/or xylose residues to yield highly complex arabinoxylans, arabinogalactans, galactomannans, and xyloglucans. The hemicellulose matrix is, in turn, surrounded by polyphenolic lignin.

[0005] The complexity of the matrix makes it difficult to degrade by microorganisms as lignin and hemicellulose components must be degraded before enzymes can act on the core cellulose microfibrils. Ordinarily, a consortium of different microorganisms is required to degrade cell wall polymers to release the constituent monosaccharides. For saccharification of plant cell walls, the lignin must be permeabilized and hemicellulose removed to allow cellulose-degrading enzymes to act on their substrate. For industrial saccharification of cell walls, large amounts of primarily fungal cellulases are added to processed feedstock that has been treated with dilute sulfuric acid at high temperature and pressure to permeabilize the lignin and partially saccharify the hemicellulose constituents.

[0006] Saccharophagus degradans strain 2-40 (herein referred to as “S. degradans 2-40” or “2-40”) is a representative of an emerging group of marine bacteria that degrade complex polysaccharides (CP). S. degradans has been deposited at the American Type Culture Collection and bears accession number ATCC 43961. S. degradans 2-40, formerly known and referred to synonymously herein as Saccharophagus degradans strain 2-40, is a marine-proteobacterium that was isolated from decaying Sparina alterniflora, a salt marsh cord grass in the Chesapeake Bay watershed. Consistent with its isolation from decaying plant matter, S. degradans strain 2-40 is able to degrade many complex polysaccharides, including cellulose, pectin, and xylan, which are common components of the cell walls of higher plants. S. degradans strain 2-40 is also able to depolymerize algal cell wall components, such as agar, agarose, and laminarin, as well as protein, chitin, starch, pullulan, and alginic acid. In addition to degrading this plethora of polymers, S. degradans strain 2-40 can utilize each of the polysaccharides as the sole carbon source. Therefore, S. degradans strain 2-40 is not only an excellent model of microbial degradation of insoluble complex polysaccharides (ICPs) but can also be used as a paradigm for complete metabolism of these ICPs. ICPs are polymerized saccharides that are used for form and structure in animals and plants. They are insoluble in water and therefore are difficult to break down.

[0007] Saccharophagus degradans strain 2-40 requires at least 1% sea salts for growth and will tolerate salt concentrations as high as 10%. It is a highly pleomorphic, Gram-negative bacterium that is aerobic, generally rod-shaped, and motile by means of a single polar flagellum. Previous work has determined that S. degradans can degrade at least 10 different carbohydrate polymers (CP), including agar, chitin, alginic acid, carboxymethylcellulose (CMC), β-glucan, laminarin, pectin, pullulan, starch and xylan (Ensor, Stotz et al. 1999). In addition, it has been shown to synthesize a true tyrosinase (Kelley, Coyne et al. 1990). 16S rDNA analysis shows that S. degradans is a member of the gamma-subclass of the phylum Proteobacteria, related to Microbulbifer hydrolyticus (Gonzalez and Weiner 2000) and to Teridinibacter sp., (Distel, Morrill et al. 2002) cellulolytic nitrogen-fixing bacteria that are symbionts of shipworms.

[0008] The agarase, chitinase and alginase systems have been generally characterized (Ekborg et al, 2006; Howard et al 2003ab; Howard et al, 2004). Zymogram activity gels indicate that all three systems are comprised of multiple depolymerases and multiple lines of evidence suggest that at least some of these depolymerases are attached to the cell surface (Stotz 1994; Whitehead 1997; Chakravorty 1998). Activity assays reveal that the majority of S. degradans enzyme activity resides with the cell fraction during logarithmic growth on CP, while in later growth phases the bulk of the activity is found in the supernatant and cell-bound activity decreases dramatically (Stotz 1994).

[0009] The oldest methods studied to convert lignocellulosic materials to saccharides are based on acid hydrolysis (see, e.g., review by Grethlein, Chemical Breakdown Of Cellulosic Materials, J. APPL. CHEM. BIOTECHNOL. 28:296-308 (1978)). This process can involve the use of concentrated or dilute acids. For example, U.S. Pat. Nos. 5,221,537 and 5,536,325, incorporated by reference herein in their entireties, describe a two-step process for the acid hydrolysis of lignocellulosic material to glucose. These processes have numerous disadvantages including, for example, recovery of the acid, the specialized materials of construction required, the need to minimize water in the system, and the high production of degradation products which can inhibit the fermentation to ethanol.

[0010] To overcome the problems of the acid hydrolysis process, cellulose conversion processes are being developed using enzymatic hydrolysis. See, for example, U.S. Pat. No. 5,916,780, incorporated by reference herein in its entirety, which discloses enzymatic hydrolysis with a pre-treatment step to break down the integrity of the fiber structure and make the cellulose more accessible to attack by cellulase enzymes in the treatment phase.

[0011] U.S. Pat. No. 6,333,181, incorporated by reference herein in its entirety, discloses production of ethanol from lignocellulosic material by treatment of a mixture of lignocellulose, cellulose, and an ethanologenic microorganism with ultrasound.

[0012] The microbial degradation of cellulose is of interest due to applications in the sugar-dependent production of alternative biofuels (Rubin, E. M. (2008) Nature 454:841-845). Cellulose is the core polymer of plant cell walls, typically comprising 40% or more of the plant cell wall, and is organized into microfibrils formed of parallel high molecular weight β-1,4-linked D-glucose polymers. (Himmel, M. E. (2007) Science 316:982-982). As cellulose microfibrils are generally too large for cellular uptake by microorganisms, they must be depolymerized extracellularly through the action of synergistically-acting glucanases in order to metabolize the material. Secreted glucanases carry a glycoside hydrolase (GH) catalytic domain from one of several families that can be joined to one or more carbohydrate binding modules (CBMs) though flexible hydrophylic linkers. (Boraston et al. (2004) Biochem J 382:769-781). Both endo- and exo-acting glucanases can be found in some GH families. Exo-acting glucanases are processive, catalyzing multiple reactions after adsorption to the substrate, whereas endo-acting glucanases typically catalyze a single reaction prior to release but can also be processive in some cases. (Doi et al. (2004) Nat Rev Microbiol 2:541-551; Wilson, D. B. (2008) Ann NY Acad Sci 1125:289-297).

[0013] There are well-characterized cellulolytic systems of fungi and bacteria that employ multiple endo- and exo-acting glucanases in the degradation of cellulose. Microorganisms producing noncomplexed cellulase systems secrete a variety of endo-β-1,4-glucanases that release cellodextrins from crystalline or amorphous cellulose, exo-acting cellobiohydrolases specific to either the non-reducing or reducing end of cellulose or cellodextrin to generate cellobiose, and β-glucosidases to convert cellobiose to glucose. (Himmel, M. E. (2007) Science 316:982-982). For example, the wood soft rot fungus, Hypocrea jecorina, produces up to eight secreted β-1,4-endoglucanases (Cel5A, Cel5B, Cel7B, Cel12A, Cel45A, Cel61A, Cel61B, Cel74A), two cellobiohydrolases (Cel6A, Cel7A), and several β-glucosidases (e.g., Bgl3A). (Martinez, D. et al (2008) Nat Biotechnol 26:1193-1193). Another well-characterized noncomplexed cellulase system is found in Thermobifida fusca, a filamentous soil bacterium that is a major degrader of organic material found in compost piles. (Wilson, D. B. (2004) Chem Rec 4:72-82). This bacterium also secretes several endoglucanases and cellobiohydrolases specific to either the nonreducing and reducing end of cellulose. The T. fusca Cel5A, Cel6A and Cel9B are classic β-1,4-endoglucanases whereas Cel9A is a processive β-1,4-endoglucanase. (Wilson, D. B. (2004) Chem Rec 4:72-82).

[0014] An alternative mechanism to degrade cellulose is found in microorganisms producing complexed cellulolytic systems, such as those found in cellulolytic clostridia. In these microorganisms, several β-1,4-endoglucanases, including processive endoglucanases, and cellobiohydrolases assemble on surface-associated scaffoldin polypeptides to form a cellulose-degrading multiprotein complexes known as cellulosomes (Doi et al. (2004) Nat Rev Microbiol 2:541-551; Bayer et al. (1998) Curr Opin Struc Biol 8:548-557). The unifying theme in noncomplexed and complexed cellulolytic systems is the importance of cellobiohydrolases in converting cellulose and cellodextrins to soluble cellobiose. Recently a complete cellulolytic system was reported in the marine bacterium Saccharophagus degradans (Taylor, L. E. et al (2006) J Bacteriol 188:3849-3861; Weiner, R. M. et al (2008) PLOS Genet. 4:e100087). This bacterium is capable of growth on both crystalline and noncrystalline cellulose and produces multiple cellulases that can be detected in zymograms of cell lysates (Taylor, L. E. et al (2006) J Bacteriol 188:3849-3861). The genome sequence of this bacterium predicts the cellulolytic system of this bacterium consists of ten GH5-containing β-1,4-endoglucanases (Cel5A, Cel5B, Cel5C, Cel5D, Cel5E, Cel5F, Cel5G, Cel5H, Cel5I, Cel5J), two GH9 β-1,4-endoglucanases (Cel9A, Cel9B), one cellobiohydrolase (Cel6A), five β-glucosidases (Bgl1A, Bgl1B, Bgl3C, Ced3A, Ced3B) and a cellobiose phosphorylase (Cep94A) (Taylor, L. E. et al (2006) J Bacteriol 188:3849-3861; Weiner, R. M. et al (2008) PLOS Genet. 4:e100087).

[0015] The apparent absence of homologs to clostridial scaffoldins in the genome sequence and to dockerin-like domains in the cellulases suggests S. degradans 2-40 produces a noncomplexed cellulolytic system. Two unusual features of this cellulolytic system are the large number of GH5 endoglucanases and the presence of only one annotated cellobiohydrolase, Cel6A, which is postulated to act from the nonreducing end of the polymer (Taylor, L. E. et al (2006) J Bacteriol 188:3849-3861; Weiner, R. M. et al (2008) PLOS Genet. 4:e100087). This enzyme, however, is expressed at a low level (Zhang and Hutcheson, unpublished) and a homolog to a cellobiohydrolase acting from the reducing end of cellulose was not detected in this bacterium's genome (Taylor, L. E. et al (2006) J Bacteriol 188:3849-3861).

[0016] There exists a need to identify enzyme systems that use cellulose as a substrate, express the genes encoding the proteins using suitable vectors, identify and isolate the amino acid products (enzymes and non-enzymatic products), and use these products as well as organisms containing these genes for purposes, such as the production of ethanol and uses described in the Bhat paper. There is also a need in the art of using lignocellulosic materials for production of biofuels such as ethanol, to develop more effective treatment methods that result in greater yields of biofuels.

### SUMMARY OF THE INVENTION

[0017] One aspect of the present invention is directed to systems of plant wall active carbohydrases and related proteins.

[0018] The invention provides a modified bacterium in which cell wall degrading enzymes are constitutively expressed at an increased rate of expression. In more specific embodiments the modified bacterium is modified to over express one or more enzymes selected from Cel5G, Cel5H or Cel5J. The modified bacterium may also express one or more enzymes from BglA, Bgl1B, Bgl3C, Ced3A, Ced3B. The bacterium may be S. degradans.

[0019] A further aspect of the invention is directed to a method for the degradation of substances comprising cellulose. The method involves contacting the cellulose containing substances with one or more compounds obtained from Saccharophagus degradans strain 2-40.

[0020] Another aspect of the present invention is directed to groups of enzymes that catalyze reactions involving cellulose.

[0021] Another aspect of the present invention is directed to polynucleotides that encode polypeptides with cellulose degrading or cellulose binding activity.

[0022] A further aspect of the invention is directed to chimeric genes and vectors comprising genes that encode polypeptides with cellulose depolymerase activity.

[0023] A further aspect of the invention is directed to a method for the identification of a nucleotide sequence encoding a polypeptide comprising any one of the following activities from S. degradans: cellulose depolymerase, or cellulose binding. An S. degradans genomic library can be constructed in E. coli and screened for the desired activity. Transformed E. coli cells with specific activity are created and isolated.

[0024] Another aspect of the invention is directed to a method for producing ethanol or another byproduct that is the product of a fermentative process from lignocellulosic material, comprising treating lignocellulosic material with an effective saccharifying amount of one or more compounds listed in FIGS. 4-11 to obtain saccharides and converting the saccharides to produce ethanol. Conversion of sugars to ethanol or another fermentative product and recovery may be accomplished by, but are not limited to, any of the well-established methods known to those of skill in the art. For example, through the use of an ethanologenic microorganism, such as Zymomonas, Erwinia, Klebsiella, Xanthomonas, and Escherichia, preferably Escherichia coli K011 and Klebsiella oxytoca P2 or butanogenic organism such as Clostridium acetobutylicum.

[0025] A further aspect of the invention is directed to a method for producing ethanol from lignocellulosic material, comprising contacting lignocellulosic material with a microorganism expressing an effective saccharifying amount of one or more compounds listed in FIGS. 4-11 to obtain saccharides and converting the saccharides to produce ethanol. See above.

[0026] A further aspect of the invention is directed to a method for producing ethanol from lignocellulosic material, comprising contacting lignocellulosic material with an ethanologenic microorganism expressing an effective saccharifying amount of one or more compounds listed in FIGS. 4-11 to produce ethanol. Such an ethanologenic microorganism expresses an effective amount of one or more compounds listed in FIGS. 4-11 to saccharify the lignocellulosic material and an effective amount of one or more enzymes or enzyme systems which, in turn, catalyze (individually or in concert) the conversion of the saccharides to ethanol. See above.

[0027] Further aspects of the invention are directed to utilization of the cellulose degrading substances in food, beer, wine, animal feeds, textile production and laundering, pulp and paper industry, and agricultural industries.

[0028] The present invention is advantageous in that saccharification of plant cell walls and ethanol production processes including saccharification may be obtained without permeabilizing lignin and/or removing or partially saccharifying the hemicellulose or hemicellulose constituents before the cellulose-degrading enzymes can act on their substrate. The present invention also allows for saccharification and ethanol production processes including saccharification without or with a reduced amount of fungal cellulases, acids (e.g., sulfuric acid), high temperatures, and high pressures in the saccharification process.

[0029] The invention provides a method for creating a mixture of enzymes for the degradation of plant material. Preferably, this degradation occurs without chemical pretreatments of the plant material. This method comprises growing Saccharophagus degradans in the presence of a given plant material and then measuring the expression of enzymes that are expressed in the Saccharophagus degradans. The enzymes that undergo increased expression in the presence of the given plant material are combined to form a mixture of enzymes for the degradation of the given plant material.

[0030] The invention also provides a modified bacterium in which enzymes that are upregulated in Saccharophagus degradans in the presence of a given plant material are constitutively expressed at an increased rate of expression. The modified bacterium is able to degrade the given plant material at a much faster rate than a non-modified bacterium. The invention also provides a modified bacterium in which enzymes that are constituitively expressed in Saccharophagus degradans are expressed at an increased rate. The modified bacterium is able to degrade the given plant material at a much faster rate than a non-modified bacterium. For example, an enzyme that is constituitively expressed is Bgl1A.

[0031] The invention also provides a method of producing ethanol, wherein a bacterium is used to degrade one or more plant materials, and the simpler sugars that result from the degradation process are used to produce ethanol in an aqueous mixture with the one or more plant materials. The ethanol is produced by any way known in the art. In one embodiment, the ethanol is produced from the degradation product of the bacterium by a yeast cell. The bacterium may be Saccharophagus degradans strain 2-40 or it may be a modified bacterium that expresses specific cell wall degrading enzymes. In specific embodiments of the invention the aqueous mixture of bacteria and one or more plant materials comprises at least 1% salt and/or at most 10% salt. These embodiments of the invention are also used to make sugar by omitting steps to convert sugars to ethanol.

[0032] The invention also provides a method of producing ethanol, wherein a mix of enzymes is used to degrade a given plant material, and the simpler sugars that result from the degradation process are used to produce ethanol. The ethanol is produced by any way known in the art. In one embodiment, the ethanol is produced from the degradation product of the bacterium by a yeast cell. The mix of enzymes is two or more of the enzymes upregulated in Saccharophagus degradans strain 2-40 in response to the presence of the given plant material. The enzymes are harvested from the Saccharophagus degradans strain 2-40 by any method known in the art. In specific embodiments of the invention the aqueous mixture of proteins and one or more plant materials comprises at least 1% salt and/or at most 10% salt. In other specific embodiments, the Saccharophagus degradans strain 2-40 is grown until it reaches an OD600 from about 0.3 to about 0.5 on the first portion of plant material. In other specific embodiments, the Saccharophagus degradans strain 2-40 is grown until it reaches an OD600 from about 5 to about 10. In other specific embodiments, the Saccharophagus degradans strain 2-40 is grown until it reaches an OD600 greater than 10. These embodiments of the invention are also used to make sugar by not adding yeast.

[0033] In more specific embodiments of the mixes of enzymes used to degrade a given plant material, the invention includes a composition comprising Cel5H and Cel5I. In another specific embodiment, the invention includes a composition comprising Cel5H and Cel5F.

[0034] In alternative embodiments of the mixes of enzymes used to degrade a given plant material, the invention includes a composition comprising Cel5F, Cel5H, Cel5I, Cep94A and Cep94B. In more specific embodiments, the invention includes a composition further comprising Cel6A, Bgl3C and Cel9B. In more specific embodiments, the invention includes a composition further comprising Cel5A, Cel5B, Cel5C, Cel5D, Cel5E, Cel5G, Cel5J, Cel9A, Bgl1A, Bgl1B, Ced3A and Ced3B. In additional embodiment, the composition of the invention further comprises yeast.

[0035] In alternative embodiments of the mixes of enzymes used to degrade a given plant material, the invention includes a composition comprising Cel5E, Cel5I, Cel9A, Bgl1A and Ced3B. In more specific embodiments, the invention includes a composition further comprising Cel5B, Cep94A and Cep94B. In additional embodiment, the composition of the invention further comprises yeast.

[0036] In alternative embodiments of the mixes of enzymes used to degrade a given plant material, the invention includes a composition comprising Cel5F, Cel9A, Bgl1A and Ced3B. In more specific embodiments, the invention includes a composition further comprising Cel5B, Cel5E, Cel5I, Bgl1B, Bgl3C, Cep94A and Cep94B. In additional embodiment, the composition of the invention further comprises yeast.

[0037] In alternative embodiments of the mixes of enzymes used to degrade a given plant material, the invention includes a composition comprising Cel5I, Bgl1A, Bgl1B, Ced3B and Cep94B. In more specific embodiments, the invention includes a composition further comprising Cel5A, Cel5G, Cel9A, Bgl3C and Cep94A. In additional embodiment, the composition of the invention further comprises yeast.

[0038] In alternative embodiments of the mixes of enzymes used to degrade a given plant material, the invention includes a composition comprising Cel5E, Cel5F, Cel5H, Cel6A and Cel9B. In more specific embodiments, the invention includes a composition further comprising Cel5I, Bgl3C and Cep94A. In other specific embodiments, the invention includes a composition further comprising Cel5C, Cel5D and Ced3A. In additional embodiment, the composition of the invention further comprises yeast.

[0039] In alternative embodiments of the mixes of enzymes used to degrade a given plant material, the invention includes a composition comprising Xyn10a, Xyn10b and Xyn11a. In more specific embodiments, the invention includes a composition further comprising Xyn10D and Xyn11B. In additional embodiment, the composition of the invention further comprises yeast.

[0040] In another embodiment of the invention, a nucleic acid that encodes an inventive desired cellulase is provided. In another embodiment, the DNA is in a vector. In a further embodiment, the vector is used to transform a host cell.

[0041] In another embodiment of this invention, a method for producing an inventive desired cellulase is provided. The method comprises the steps of culturing a host cell transformed with a nucleic acid encoding a desired cellulase in a suitable culture medium under suitable conditions to produce the desired cellulase and obtaining the desired cellulase so produced.

### BRIEF DESCRIPTION OF THE FIGURES

[0042] FIG. 1A shows the chemical formula of cellulose.

[0043] FIG. 1B illustrates the physical structure of cellulose.

[0044] FIG. 2A illustrates the degradation of cellulose fibrils.

[0045] FIG. 2B shows the chemical representation of cellulose degradation to cellobiose and glucose.

[0046] FIG. 3 shows SDS-PAGE and Zymogram analysis of S. degradans culture supernatants.

[0047] FIG. 4 lists the predicted cellulases of S. degradans 2-40 (the sequences from FIGS. 4-10 are disclosed as SEQ ID NOs 1-214, respectively in order of appearance, 1—Acronyms, cel=cellulase, ced=cellodextrinase, bql=6-glucosidase, cep=cellobiose/cellodextrin phosphorylase; 2—Protein identified by tandem mass spectrometry in supernatant concentrates. Growth substrates: av=avicel, aq=agarose, al=alginate, cm=CMC, xn=xylan; 3—MW and amino acid count calculated using the protParam (protein parameters) tool at the Expasy website based on the DOE/JGI gene model amino acid sequence translations and includes any predicted signal peptide; 4—Predictions of function and GH, GT and CBM module determination according to CAZy ModO analysis by B. Henrissat, AFMB-CRNS; Da^{gg}ers (t) indicate lack of a secretion signal sequence; 5—Nonstandard module abbreviations, LPB=lipobox motif, PSL=polyserine linker, EPR=glutamic acid-proline rich region, PLP=phospholipase-like domain, number in parentheses indicates the length of the indicated feature in amino acid residues; 6—Refseq accession number of gene amino acid sequence from the Entrez protein database.

[0048] FIG. 5 lists the predicted xylanases, xylosidases and related accessories of S. degradans 2-40.

[0049] FIG. 6 lists the predicted pectinases and related accessories of S. degradans 2-40, 1—Acronyms, pet=pectate lyase, pes=pectin methylesterase, rql=rhamnogalacturonan lyase; 2—MW and amino acid count calculated using the protParam (protein parameters) tool at the Expasy website based on the DOE/JGI gene model amino acid sequence translations and includes any predicted signal peptide; 3—Predictions of function and GH, GT, PL, CE and CBM module determination according to CAZy ModO analysis by B. Henrissat, AFMB-CRNS; 4—Module abbreviations, CE=carbohydrate esterase, FN3=fibronectin type3-like domain, LPB=lipobox motif, PL=pectate lyase, PSR=polyserine region, EPR=glutamic acid-proline rich region, number in parentheses indicates the length of the indicated feature in amino acid residues; 5—Refseq accession number of gene model amino acid sequence from the Entrez Pubmed database;

[0050] FIG. 7 lists the arabinanases and arabinogalactanases of S. degradans 2-40.

[0051] FIG. 8 lists the mannanases of S. degradans 2-40.

[0052] FIG. 9 lists the laminarinases of S. Degradans 2-40, Superscripts: 1—Acronyms, lam=laminarinase; 2—MW and amino acid count calculated using the protParam (protein parameters) tool at the Expasy website based on the DOE/JGI gene model amino acid sequence translations and includes any predicted signal peptide; 3-Predictions of function and GH, GT, PL, CE and CBM module determination according to CAZy Mod( ) analysis by B. Henrissat, AFMB-CRNS; 4—Module abbreviations: TSP3=thrombospondin type3 repeats, COG3488=thiol-oxidoreductase like domain of unknown function (Interestingly, a similar domain is found in cbm32A: see table 7), PSD=polyserine domain, TMR=predicted transmembrane region, FN3=fibronectin type3like domain, EPR=glutamic acid-proline rich region, CADG=cadherin-like calcium binding motif, number in parentheses indicates the length of the indicated feature in amino acid residues; 5—Refseq accession number can be used to retrieve the gene model amino acid sequence from the Entrez Pubmed database.

[0053] FIG. 10 lists selected carbohydrate-binding module proteins of S. degradans 2-40

[0054] FIG. 11 lists the recombinant proteins of S. degradans 2-40 and a comparison of predicted vs. observed molecular weights thereof.

[0055] FIG. 12 provides a zymogram of S. degradans GH5 Cellulase activities. After fractionation by SDS-PAGE and renaturing, retained substrate was stained using Congo Red. Zones of clearing represent glucanase activity. Similar results were obtained in zymograms containing HE-cellulose. With the exception of Cel5E and Cel5J, expression of each protein in the Rossetta 2™ (DE3) host was equivalent in commassie blue-stained gels. To resolve the activity of polypeptides in the zymograms, the samples were diluted. The amount of protein in each well was equivalent to the original cell culture (nanoliters): Cel5A (100), Cel5B (1000), Cel5C (7000), Cel5D (7000), Cel5E (1000), Cel5F (100), Cel5G (1), Cel5H (10), Cel5I (7000), Cel5J (10). Precision Plus molecular weight markers (Bio-Rad, Hercules, Calif.) were used as molecular weight markers.

[0056] FIG. 13 provides an analysis of products formed by S. degradans Cel5H activity. Left: Products formed on the indicated substrate: A, Avicel™; FP, filter paper; and SC, phosphoric acid swollen cellulose. Reaction mixtures containing purified Cel5H and the substrate were incubated at 50° C. for 16 h. Two μl aliquots were spotted on Silica G plates and resolved using a nitromethane-propanol-water solvent system. The markers, G1-G4, represent glucose, cellobiose, cellotriose and cellotetraose. Right: Time course of products released by the activity of S. degradans Cel5H on swollen cellulose. Reaction conditions were as described in the Materials and Methods and products resolved as above. Time is indicated in minutes.

[0057] FIG. 14 relates to the processivity of S. degradans Cel5H and Cel5H′. Purified Cel5H or Cel5H′ were incubated with filter paper for the indicated time and products formed as reducing sugar determined. Diamonds (top line) indicate soluble reducing sugar detected (μmol cellobiose). Squares (bottom line) indicate insoluble reducing sugar (μmol glucose). Linear trendlines were calculated using y=mx. For release of soluble reducing sugar, m=0.0108 with a goodness of fit R²=0.97). For formation of insoluble reducing sugar, m=0.0020. R²=0.94.

[0058] FIG. 15 relates to the effect of S. degradans Cel5H, T. fusca Cel9B and T. fusca Cel6B on the viscosity of carboxymethyl cellulose. The viscosity was measured as a function of time as described in the Materials and Methods. The viscosity is given in centipoise (cP).

[0059] FIG. 16 relates to the phylogenetic analysis of S. degradans GH5 domains and their processivity on filter paper. The sequences of the GH5 domains found in the S. degradans cellulases identified by Taylor et al. (J Bacteriol 188:3849-3861 (2006)) together with the closest homologs identified in another organism by BLAST were extracted using the SMART algorithm and subjected to nearest neighbor analysis as described in the Materials and Methods. The resulting phylogenetic tree as well as the structures predicted by SMART are shown. The processivities of the indicated enzymes were determined as in FIG. 3. Gene designations with accession number of the closest homolog: Cel5A-N-YP_{—}435061 (Endoglucanase [Hahella chejuensis KCTC 2396]); Cel5A-C-YP_{—}528706 (Sde 3237, Cel5H); Cel5B-ZP_{—}00510594 (Glycoside hydrolase, family 5: Clostridium cellulosome enzyme, dockerin type I: Carbohydrate binding domain, family 11 [Clostridium thermocellum ATCC 27405]); cel5C ZP_{—}01246425 (Glycoside hydrolase, family 5 [Flavobacterium johnsoniae UW101]); Cel5D ZP_{—}01115721 (Endoglucanase family 5 [Reinekea sp. MED297]); Cel5E (Sde 2490, Cel5B); Cel5F ABA02176 (cellulase [uncultured bacterium])—new best hit(7/8/8): Cellvibrio japonicus Ueda107; Cel5G YP_{—}528706 (Sde 3237, Cel5H); Cel5H YP_{—}528708 (Sde_{—}3239, Cel5G); Cel5I ZP_{—}01113981 (endo-1,4-β-glucanase [Reinekea sp. MED297]); Cel5J YP_{—}435061 (Endoglucanase [Hahella chejuensis KCTC 2396]).

[0060] FIG. 17 relates to the analysis of products formed by digestions of secreted S. degradans 2-40 enzymes. S. degradans 2-40 was grown on Avicel™ for 24 hours and supernatant decanted. The supernatant was then digested with swollen cellulose (SC) for 24 hours. Two μl aliquots were spotted onto the TLC plate as described in the materials and methods. The result for the digestion of swollen cellulose is compared to the enzyme supernatant and the SC substrate prior to digestion.

[0061] FIG. 18 provides an illustration of one embodiment of the method for producing a new S. degradans strain.

[0062] FIG. 19 provides a restriction map of the pDSK600 plasmid.

[0063] FIG. 20 provides a zymogram of Zym5 and Zym8 grown on Avicel™. Lane 1 represents original wild-type bacterium; lane 2 represents Zym5 (strain over-expressing Cel5G); lane 3 represents Wild-type bacterium again; and lane 4 represents Zym8 strain (strain over expressing Cel5J).

[0064] FIG. 21 provides a growth curve of modified host cells (Zym strains) grown on glucose.

[0065] FIG. 22 provides a graph showing corrected data showing real distribution of the cellulase activity between cells and the medium. The total activity produced by each strain in this assay are (units Azcl Cellulose Degradation).

### DETAILED DESCRIPTION

[0066] The invention provides genetic modification of marine bacteria with processive cellulases for the more efficient saccharification of cellulose.

[0067] Saccharophagus degradans 2-40 is a marine bacterium capable of degrading all of the polymers found in the higher plant cell wall using secreted and surface-associated enzymes. This bacterium has the unusual ability to saccharify whole plant material without chemical pretreatments. For example, this bacterium is able to utilize as sole carbon sources (generation time at same concentration, h): glucose (2.6), Avicel™ (2.25), oat spelt xylan (1.6), newsprint (>6), whole and pulverized corn leaves (>6), and pulverized Panicum vigatum leaves (>6), indicating the production of synergistically-acting hemicellulases, pectinases, cellulases, and possibly ligninases.

[0068] Analysis of the genome sequence of S. degradans 2-40 reveals an abundance of genes coding for enzymes that are predicted to degrade plant-derived carbohydrates. To date, S. degradans is the only sequenced marine bacterium with apparently complete cellulase and xylanase systems, as well as a number of other systems containing plant-wall active carbohydrases.

[0069] Thus it appears that S. degradans can play a significant role in the marine carbon cycle, functioning as a “super-degrader” that mediates the breakdown of CP from various algal, plantal, and invertebrate sources. The remarkable enzymatic diversity, novel surface features (ES), and the apparent localization of carbohydrases to ES make S. degradans 2-40 an intriguing organism in which to study the cell biology of CP metabolism and surface enzyme attachment.

[0070] It has now been discovered that S. degradans has a complete complement of enzymes, suitably positioned, to degrade plant cell walls. This has been accomplished by the following approaches: a) annotation and genomic analysis of S. degradans plant-wall active enzyme systems, b) identification of enzymes and other proteins which contain domains or motifs that may be involved in surface enzyme display, c) the development of testable models based on identified protein motifs, and d) cloning and expression of selected proteins for the production of antibody probes to allow testing of proposed models of surface enzyme display using immunoelectron microscopy.

[0071] These efforts have been greatly facilitated by the recent sequencing of the genome of S. degradans strain 2-40, allowing a strategy where genes which code for proteins with potential involvement in surface attachment may be identified based on sequence homology with modules or domains known to function in surface attachment and/or adhesion.

[0072] Enzymatic and non-enzymatic ORFs with compelling sequence elements are identified using BLAST and other amino acid sequence alignment and analysis tools. Genes of interest can be cloned into E coli, expressed with in-frame polyhistidine affinity tag fusions and purified by nickel ion chromatography, thus providing the means of identifying and producing recombinant S. degradans proteins for study and antibody probe production.

[0073] The genome sequence of S. degradans was recently obtained in conjunction with the Department of Energy's Joint Genome Initiative (JGI). The finished draft sequence dated Jan. 19, 2005 comprises 5.1 Mbp contained in a single contiguous sequence. Automated annotation of open reading frames (ORFs) was performed by the computational genomics division of the Oak Ridge National Laboratory (ORNL), and the annotated sequence is available on the World Wide Web (http://genome.ornl.gov/microbial/mdeg).

[0074] The initial genome annotation has revealed a variety of carbohydrases, including a number of agarases, alginases and chitinases. Remarkably, the genome also contains an abundance of enzymes with predicted roles in the degradation of plant cell wall polymers, including a number of ORFs with homology to cellulases, xylanases, pectinases, and other glucanases and glucosidases. In all, over 180 open reading frames with a probable role in carbohydrate catabolism were identified in the draft genome.

[0075] To begin to define the cellulase, xylanase and pectinase systems of S. degradans, genes were initially classified as belonging to one of those systems by BLAST homology. Ambiguous ORFs were tentatively assigned to the class of the best known hit. Other tools used to refine this tentative classification include Pfam (Protein families database of alignments and HMMs; http://www.sanger.ac.uk/Software/Pfam/) and SMART (Simple Modular Architecture Research Tool; http://smart.embl-heidelberg.de/) which use multiple alignments and hidden Markov models (statistical models of sequence consensus homology) to identify discreet modular domains within a protein sequence. These analyses were relatively successful; however, a number of ORFs remained difficult to classify based on sequence homology alone.

[0076] Enzymes have traditionally been classified by substrate specificity and reaction products. In the pre-genomic era, function was regarded as the most amenable (and perhaps most useful) basis for comparing enzymes and assays for various enzymatic activities have been well-developed for many years, resulting in the familiar EC classification scheme. Cellulases and other O-Glycosyl hydrolases, which act upon glycosidic bonds between two carbohydrate moieties (or a carbohydrate and non-carbohydrate moiety—as occurs in nitrophenol-glycoside derivatives) are designated as EC 3.2.1.-, with the final number indicating the exact type of bond cleaved. According to this scheme an endo-acting cellulase (1,4-β-endoglucanase) is designated EC 3.2.1.4.

[0077] With the advent of widespread genome sequencing projects and the ease of determining the nucleotide sequence of cloned genes, ever-increasing amounts of sequence data have facilitated analyses and comparison of related genes and proteins on an unprecedented scale. This is particularly true for carbohydrases; it has become clear that classification of such enzymes according to reaction specificity, as is seen in the E.C. nomenclature scheme, is limited by the inability to convey sequence similarity. Additionally, a growing number of carbohydrases have been crystallized and their 3-D structures solved.

[0078] One of the major revelations of carbohydrase sequence and structure analyses is that there are discreet families of enzymes with related sequence, which contain conserved three-dimensional folds that can be predicted based on their amino acid sequence. Further, it has been shown that enzymes with the same three-dimensional fold exhibit the same stereospecificity of hydrolysis, even when they catalyze different reactions (Henrissat, Teeri et al. 1998; Coutinho and Henrissat 1999).

[0079] These findings form the basis of a sequence-based classification of carbohydrase modules which is available in the form of an internet database, the Carbohydrate-Active enZYme server (CAZy), at http://afmb.cnrs-mrs.fr/CAZY/index.html (Coutinho and Henrissat 1999; Coutinho and Henrissat 1999).

[0080] CAZy defines four major classes of carbohydrases, based on the type of reaction catalyzed: Glycosyl Hydrolases (GH's), Glycosyltransferases (GT's), Polysaccharide Lyases (PL's), and Carbohydrate Esterases (CE's). GH's cleave glycosidic bonds through hydrolysis. This class includes many familiar polysaccharidases such as cellulases, xylanases, and agarases. GT's generally function in polysaccharide synthesis, catalyzing the formation of new glycosidic bonds through the transfer of a sugar molecule from an activated carrier molecule, such as uridine diphosphate (UDP), to an acceptor molecule. While GT's often function in biosynthesis, there are examples where the mechanism is exploited for bond cleavage, as occurs in the phosphorolytic cleavage of cellobiose and cellodextrins. PL's use a β-elimination mechanism to mediate bond cleavage and are commonly involved in alginate and pectin depolymerization. CE's generally act as deacetylases on O- or N-substituted polysaccharides. Common examples include xylan and chitin deacetylases. Sequence-based families are designated by number within each class, as is seen with GH5: glycosyl hydrolase family 5. Members of GH5 hydrolyze β-1,4 bonds in a retaining fashion, using a double-displacement mechanism which results in retention of the original bond stereospecificity. Retention or inversion of anomeric configuration is a general characteristic of a given GH family (Henrissat and Bairoch 1993; Coutinho and Henrissat 1999). Many examples of endocellulases, xylanases and mannanases belonging to GH5 have been reported, illustrating the variety of substrate specificity possible within a GH family. Also, GH5s are predominantly endohydrolases—cleaving chains of their respective substrates at random locations internal to the polymer chains. While true for GH5, this generalization does not hold for many other GH families. In addition to carbohydrases, the CAZy server defines numerous families of Carbohydrate Binding Modules (CBM). As with catalytic modules, CBM families are designated based on amino acid sequence similarity and conserved three-dimensional folds.

[0081] The CAZyme structural families have been incorporated into a new classification and nomenclature scheme, developed by Bernard Henrissat and colleagues (Henrissat, Teeri et al. 1998). Traditional gene/protein nomenclature assigns an acronym indicating general function and order of discovery; in this scheme an organism's cellulase genes are designated celA, celB, etc., regardless of their actual mechanism of action on cellulose. Some researchers have attempted to convey more information by naming cellulases as endoglucanases (engA, engB) or cellobiohydrolases (cbhA, cbhB), however this requires determination of function in vitro and still fails to convey relatedness of protein sequence and structure. CAZyme nomenclature retains the familiar acronym to indicate the functional system a gene belongs to and incorporates the family number designation. Capital letters after the family number indicate the order of report within a given organism system. An example is provided by two endoglucanases, CenA and CenB, of Cellulomonas fimi. In the old nomenclature nothing can be deduced from the names except order of discovery. Naming them Cel6A and Cel9A, respectively, makes it immediately clear that these two cellulases are unrelated in sequence, and so belong to different GH families (where Cel stands for cellulase, and 9 for glycosyl hydrolase family nine). While this scheme does not distinguish between endo- and exo-activity, these designations are not absolute and can be included in discussion of an enzyme when relevant (i.e. the cellobiohydrolase Cel6A, the endoxylanase Xyn10B). Catalytic modules take precedence in naming carbohydrases; since many (or even most) carbohydrases contain at least one CBM, they are named for their enzymatic module. If more than one catalytic domain is present, they are named in order from N-terminus to C-terminus, i.e. cel9A-cel48A contains a GH9 at the amino-terminus and a GH48 at the carboxy-terminus. Both domains act against cellulose. There are, however, many examples of CBM modules occurring on proteins with no predicted carbohydrase module. In the absence of some other predicted functional domain (like a protease) these proteins are named for the CBM module family. If there are multiple CBM families present, then naming is again from amino to carboxy end, i.e. cbm2D-cbm10A. This nomenclature has been widely accepted and will be used in the naming of all S. degradans plant-wall active carbohydrases and related proteins considered as part of this study.

[0082] The cell walls of higher plants are comprised of a variety of carbohydrate polymer (CP) components. These CP interact through covalent and non-covalent means, providing the structural integrity plants required to form rigid cell walls and resist turgor pressure. The major CP found in plants is cellulose, which forms the structural backbone of the cell wall. See FIG. 1A. During cellulose biosynthesis, chains of poly-β-1,4-D-glucose self associate through hydrogen bonding and hydrophobic interactions to form cellulose microfibrils which further self-associate to form larger fibrils. Cellulose microfibrils are somewhat irregular and contain regions of varying crystallinity. The degree of crystallinity of cellulose fibrils depends on how tightly ordered the hydrogen bonding is between its component cellulose chains. Areas with less-ordered bonding, and therefore more accessible glucose chains, are referred to as amorphous regions (FIG. 1B). The relative crystallinity and fibril diameter are characteristic of the biological source of the cellulose. The irregularity of cellulose fibrils results in a great variety of altered bond angles and steric effects which hinder enzymatic access and subsequent degradation.

[0083] The general model for cellulose depolymerization to glucose involves a minimum of three distinct enzymatic activities (See FIGS. 2A and 2B). Endoglucanases cleave cellulose chains internally to generate shorter chains and increase the number of accessible ends, which are acted upon by exoglucanases. These exoglucanases are specific for either reducing ends or non-reducing ends and frequently liberate cellobiose, the dimer of cellulose (cellobiohydrolases). The accumulating cellobiose is cleaved to glucose by cellobiases (β-1,4-glucosidases). In many systems an additional type of enzyme is present: cellodextrinases are β-1,4-glucosidases which cleave glucose monomers from cellulose oligomers, but not from cellobiose. Because of the variable crystallinity and structural complexity of cellulose, and the enzymatic activities required for is degradation, organisms with “complete” cellulase systems synthesize a variety of endo and/or exo-acting β-1,4-glucanases.

[0084] For example, Cellulomonas fimi and Thermobifida fusca have each been shown to synthesize six cellulases while Clostridium thermocellum has as many as 15 or more. Presumably, the variations in the shape of the substrate-binding pockets and/or active sites of these numerous cellulases facilitate complete cellulose degradation. Organisms with complete cellulase systems are believed to be capable of efficiently using plant biomass as a carbon and energy source while mediating cellulose degradation. The ecological and evolutionary role of incomplete cellulose systems is less clear, although it is believed that many of these function as members of consortia (such as ruminal communities) which may collectively achieve total or near-total cellulose hydrolysis.

[0085] In the plant cell wall, microfibrils of cellulose are embedded in a matrix of hemicelluloses (including xylans, arabinans and mannans), pectins (galacturonans and galactans), and various β-1,3 and β-1,4 glucans. These matrix polymers are often substituted with arabinose, galactose and/or xylose residues, yielding arabinoxylans, galactomannans and xyloglucans—to name a few. The complexity and sheer number of different glycosyl bonds presented by these non-cellulosic CP requires specific enzyme systems which often rival cellulase systems in enzyme count and complexity. Because of its heterogeneity, plant cell wall degradation often requires consortia of microorganisms.

[0086] Objectives—S. degradans synthesize complete multi-enzyme systems that degrade the major structural polymers of plant cell walls. A) define cellulase and xylanase systems, determining the activities of genes for which function cannot be predicted by sequence homology; and B) genomic identification and annotation of other plant-degrading enzyme systems by sequence homology (i.e. pectinases, laminarinases, etc.).

[0087] From the ORNL annotation it is clear that the S. degradans genome contains numerous enzymes with predicted activity against plant cell wall polymers. This is particularly surprising since S. degradans is an estuarine bacterium with several complex enzyme systems that degrade common marine polysaccharides such as agar, alginate, and chitin. Defining multienzyme systems based on automated annotations is complicated by the presence of poorly conserved domains and/or novel combinations of domains. There are many examples of this in the plant-wall active enzymes of S. degradans. Accordingly, the ORNL annotations of carbohydrase ORFs were manually reviewed with emphasis on the modular composition and then assigned to general groups based on the substrate they were likely to be involved with (i.e. cellulose or xylan degradation). These genomic sequence analyses resulted in a pool of about 25 potential cellulases, 11 xylanases and 17 pectinases.

[0088] When sequence homology is well-conserved, highly accurate predictions of function are possible. Therefore, to verify the presence of functioning cellulase and xylanase systems in S. degradans, zymograms and enzyme activity assays were performed as discussed below. Also, attempts were made to identify enzymes from S. degradans culture supernatants using Mass Spectrometry based proteomics.

[0089] Next, more sophisticated genomic analyses were used to predict function where possible and to identify ORFs which require functional characterization to determine their roles, if any, in the cellulase and xylanase systems. ORFs which belong to other plant wall-active enzyme systems were tentatively classified based on the sequence analyses and functional predictions of B. Henrissat.

[0090] To gain insight into the induction and expression of S. degradans cellulases and xylanases, specific activities were determined for Avicel™ and xylan-grown cells and supernatants by dinitrosalicylic acid reducing-sugar assays (DNSA assays), as discussed in the Experimental Protocols section at the end of this proposal. Xylanase activity was measured for Avicel™-grown cultures, and vice versa, in order to investigate possible co-induction of activity by these two substrates which occur together in the plant cell wall.

[0091] Growth on either Avicel™ or xylan yields enzymatic activity against both substrates, suggesting co-induction of the cellulase and xylanase systems. As with other S. degradans carbohydrase systems, highest levels of activity were induced by the homologous substrate. The results also reveal some key differences in the expression of these two systems. When grown on Avicel™, cellulase activity is cell-associated in early growth and accumulates significantly in late-stage supernatants. Cell and supernatant fractions exhibit low levels of xylanase activity that remain roughly equal throughout all growth phases. In contrast, xylan-grown cultures exhibit the majority of xylanase and cellulase activity in the cellular fraction throughout the growth cycle. Cellulase activity does not accumulate in the supernatant and xylanase activity accumulates modestly, but still remains below the cell-bound activity.

[0092] Enzyme activity gels (zymograms) of Avicel™ and xylan grown cell pellets and culture supernatants were analyzed to visualize and identify expressed cellulases and xylanases. The zymograms revealed five xylanolytic bands in xylan-grown supernatants (FIG. 3), four of which correspond well with the calculated MW of predicted xylanases (xyl/arb43G-xyn10D: 129.6 kDa, xyn10E: 75.2 kDa, xyn10C: 42.3 kDa, and xyn11A: 30.4 kDa; see Table 2). Avicel™-grown cultures showed eight active bands with MWs ranging from 30-150 kDa in CMC zymograms. CMC is generally a suitable substrate for endocellulase activity. These zymograms clearly demonstrate that S. degradans synthesizes a number of endocellulases of varied size during growth on Avicel™-indicative of a functioning multienzyme cellulase system. Together, the CMC and xylan zymograms confirm the results of the genomic analyses and the inducible expression of multienzyme cellulase and xylanase systems in S. degradans 2-40.

[0093] The amino acid translations of all gene models in the S. degradans draft genome were analyzed on the CAZy ModO (Carbohydrase Active enzyme Modular Organization) server at AFMB-CRNS. This analysis identified all gene models that contain a catalytic module (GH, GT, PL, or CE) and/or a CBM. In all, the genome contains 222 gene models containing CAZy domains, most of which have modular architecture. Of these, 117 contain a GH module, 39 have GTs, 29 PLs, and 17 CE. Many of these carry one or more CBM from various families. There are also 20 proteins that contain a CBM but no predicted carbohydrase domain.

[0094] Detailed comparisons of S. degradans module sequences to those in the ModO database allowed specific predictions of function for modules where the sequence of the active site is highly conserved. For example, Cel9B (from the gel slice MS/MS) contains a GH9 module which is predicted to function as an endocellulase, a CBM2 and a CBM10 module.

[0095] When catalytic module sequences are less conserved, only a general mechanism can be predicted. This is the case with gly5M which contains a GH5 predicted to be either a 1, 3 or 1,4 glucanase—sequence analysis cannot be certain which, and so the acronym designation “gly” for glycanase.

[0096] The results of this detailed evaluation and analysis were used to assign genes to cellulase, xylanase, pectinase, laminarinase, arabinanase and mannanase systems. Each system was also assigned the relevant accessory enzymes, i.e. cellobiases belong to the cellulase system and xylosidases belong to the xylanase system. Genes with less-conserved GH modules which have the most potential to function as cellulases, xylanases or accessories were identified and designated as needing demonstration of function.

[0097] The major criteria for assigning function will be the substrate acted upon, and the type of activity detected. As such, the various enzyme activity assays will focus on providing a qualitative demonstration of function rather than on rigorously quantifying relative activity levels. The assays required are dictated by the substrate being tested, and are discussed in more detail in Experimental Protocols. For cellulose it is important to distinguish between β-1,4-endoglucanase (endocellulase), β1,4-exoglucanase (cellobiohydrolase), and β-1,4-glucosidase (cellobiase) activities. This will be accomplished using zymograms to assay for endocellulase, DNSA reducing-sugar assays for cellobiohydrolase, and p-nitrophenol-β-1,4-cellobioside (pnp-cellobiose) for cellobiase activity. The combined results from all three assays will allow definition of function as follows: a positive zymogram indicates endocellulase activity, a negative zymogram combined with a positive DNSA assay and a negative pnp-cellobiose assay indicates an exocellulase, while a negative zymogram and DNSA with a positive pnp-cellobiose result will imply that the enzyme is a cellobiase. To date the predicted biochemical activities as an endoglucanase have been demonstrated for Cel5A, Cel5B, Cel5E, Cel5F, Cel5G, Cel5H, Cel5J, Cel9A, and Cel9B. Cellobiohydrolase activity has been shown for Cel6A and β-glucosidase activity confirmed for Bgl1A, Bgl1B, Bgl3C, Ced3A, and Ced3B. Cep94A has been shown to be a cellobiose phosphorylase.

[0098] Xylanase (β-1,4-xylanase), laminarinase (β-1,3-glucanase), and mixed glucanase (β-1,3(4)-glucanase) activity will be determined by xylan, laminarin and barley glucan zymograms, respectively. Unlike cellulose, there do not appear to be any reports of “xylobiohydrolases” or other exo-acting enzymes which specifically cleave dimers from these substrates. Thus zymograms will suffice for demonstrating depolymerase (endo) activity and pnp-derivatives will detect monosaccharide (exo) cleavage. The pnp-derivatives used in this study will include pnp-α-L-arabinofuranoside, -α-L-arabinopyranoside, -β-L-arabinopyranoside, -β-D-cellobioside, -α-D-xylopyranoside and -β-D-xylopyranoside. These substrates were chosen based on the possible activities of the domains in question. The assays will allow determination of function for any α- and β-arabinosidases, β-cellobiases, β-xylosidases, bifunctional α-arabinosidase/β-xylosidases, and α-xylosidases—which cleave α-linked xylose substituents from xyloglucans. The pnp-derivative assays will be run in 96-well microtiter plates using a standard curve of p-nitrophenol concentrations, as discussed in Experimental Protocols. To date Xyn11A and Xyn11B have been shown to have xylanase activity.

### Experimental Protocols

### Zymograms

[0099] All activity gels were prepared as standard SDS-PAGE gels with the appropriate CP substrate incorporated directly into the separating gel. Zymograms are cast with 8% polyacrylamide concentration and the substrate dissolved in dH₂O and/or gel buffer solution to give a final concentration of 0.1% (HE-cellulose), 0.15% (barley β-glucan), or 0.2% (xylan). Gels are run under discontinuous conditions according to the procedure of Laemmli (Laemmli 1970) with the exception of an 8 minute treatment at 95° C. in sample buffer containing a final concentration of 2% SDS and 100 mM dithiothreitol (DTT). After electrophoresis, gels are incubated at room temperature for 1 hour in 80 ml of a renaturing buffer of 20 mM PIPES buffer pH 6.8 which contains 2.5% Triton X-100, 2 mM DTT and 2.5 mM CaCl₂. The calcium was included to assist the refolding of potential calcium-binding domains such as the tsp3s of Lam16A.

[0100] After the 1 hour equilibration, gels were placed in a fresh 80 ml portion of renaturing buffer and held overnight at 4° C. with gentle rocking. The next morning gels were equilibrated in 80 ml of 20 mM PIPES pH6.8 for 1 hour at room temperature, transferred to a clean container, covered with the minimal amount of PIPES buffer and incubated at 37° C. for 4 hours. Following incubation gels were stained for 30 minutes with a solution of either 0.25% Congo red in dH₂O (HE-cellulose, β-glucan and xylan) or 0.01% Toluidine blue in 7% acetic acid. Gels were destained with 1M NaCl for Congo red and dH₂O for Toluidine blue until clear bands were visible against a stained background.

### DNS Reducing-Sugar Assays

[0101] Saccharifying enzyme activity is assayed using DNS assay for reducing sugars (Ghose 1987. Pure Apl Chem 59; 257-268). Test substrates include avicel, CMC, phosphoric-acid swollen cellulose (PASC), Barley glucan, laminarin, and xylan dissolved at 1% in 20 mM PIPES pH 6.8 (Barley glucan and laminarin, 0.5%). Barley glucan, laminarin and xylan assays are incubated 2 hours at 50° C.; avicel, CMC and PASC assays were incubated 1 hour at 37° C. Samples are assayed in triplicate, corrected for blank values, and levels estimated from a standard curve. Enzymatic activity is calculated, with one unit (U) defined as 1 μM of reducing sugar released/minute and reported as specific activity in U/mg protein.

Exoglycosidase Activity Assays: pnp-Derivatives

[0102] Purified proteins were assayed for activity against pNp derivatives of α-L-arabinofuranoside, -α-L-arabinopyranoside, -β-L-arabinopyranoside, -β-D-cellobioside, -α-D-glucopyranoside, -β-D-glucopyranoside, -α-D-xylopyranoside and -β-D-xylopyranoside. 25 μl of enzyme solution was added to 125 μl of 5 mM substrate solution in 20 mM PIPES pH 6.8, incubated for 30 min at 37° C., and A₄₀₅ was determined. After correcting for blank reactions, readings were compared to a p-nitrophenol standard curve and reported as specific activities in U/mg protein, with one unit (U) defined as 1 μmol p-Np/min.

Cloning and Expression of Saccharophagus Degradans Proteins or Saccharophagus Degradans-like proteins in E coli

[0103] The basic cloning and expression system uses pET28B (Novagen) as the vector, E coli DH5α (Invitrogen) as the cloning strain, and E coli BL-21(DE3) Rosetta2™ (DE3) cells (Novagen) for protein expression strain. This system allows the cloning of toxic or otherwise difficult genes because the vector places expression under the control of a T7 lac promoter—which is lacking in the cloning strain DH5α, thereby abolishing even low-level expression during plasmid screening and propagation. After the blue/white screen, plasmids are purified from DH5α and transformed into the expression host (Tuners). The Tuner strain has the T7 lac promoter, allowing IPTG-inducible expression of the vector-coded protein and lacks the Lon and Omp proteases.

[0104] The nucleotide sequences of gene models were obtained from the DOE JGI's Saccharophagus degradans genome web server and entered into the PrimerQuest™ design tool provided on Integrated DNA Technologies web page located at http://biotools.idtdna.com/Primerguest/. The design parameters were Optimum Tₘ 60° C., Optimum Primer Size 20 nt, Optimum GC %=50, and the product size ranges were chosen so that the primers were selected within the first and last 100 nucleotides of each ORF in order to clone as much of the gene as reasonably possible. The cloning and expression vector, pETBlue2, provides a C-terminal 6× Histidine fusion as well as the start and stop codon for protein expression. Thus, careful attention to the frame of the vector and insert sequences is required when adding 5′ restriction sites to the PCR primers. The resulting “tailed primers” were between 26 to 30 nt long, and their sequences were verified by “virtual cloning” analysis using the PDRAW software package. This program allows vector and insert DNA sequences to be cut with standard restriction enzymes and ligated together. The amino acid translations of the resulting sequences were examined to detect any frame shifts introduced by errors in primer design. Following this verification, the primers were purchased from Invitrogen (Frederick, Md.).

[0105] PCR reactions contained 10 pMol of forward and reverse primers, 1 μl of 10 mM DNTPs, 1.5 μl of 100 mM MgCl₂, and 1 μl Proof Pro® Pfu Polymerase in a 501 reaction with 0.5 μl of S. degradans genomic DNA as the template. PCRs conditions used standard parameters for tailed primers and Pfu DNA polymerase. PCR products were cleaned up with the QIAGEN QIAquick PCR Cleanup kit and viewed in 0.8% agarose gels. Following cleanup and confirmation of size, PCR products and pETBlue2 are digested with appropriate restriction enzymes, usually Ascl and Clal at 37° C. for 1 to 4 hours, cleaned up using the QIAquick kit, and visualized in agarose gels. Clean digestions are ligated using T4 DNA ligase for at least 2 hours in the dark at room temperature. Ligations are then transformed into E coli DH5α by electroporation. Transformants are incubated one hour at 37° C. in non-selective media, and then plated onto LB agar containing ampicillin and X-gal. As pETBlue2 carries an Amp^{r} gene and inserts are cloned into the lacZ ORF, white colonies contain the insert sequence. White colonies are picked with toothpicks and patched onto a new LB/Amp/X-gal plate, with three of the patched colonies also being used to inoculate 3 ml overnight broths. Plasmids are prepped from broths which correspond to patched colonies which remained white after overnight outgrowth. These plasmid preps are then singly digested with an appropriate restriction enzyme and visualized by agarose electrophoresis for size confirmation.

[0106] The plasmids are then heat-shock transformed into the Rosetta® strain. The Transformants are incubated 1 hour at 37° C. in non-selective rescue medium, plated on LB agar with Amp nd incubated overnight at 37° C. Any colonies thus selected should contain the vector and insert. This is confirmed by patching three colonies onto a Tuner medium plate and inoculating corresponding 3 ml overnight broths. The next morning the broths are used to inoculate 25 ml broths which are grown to an OD₆₀₀ of around 0.6 (2-3 hours). At this point a 1 ml aliquot is removed from the culture, pelleted and resuspended in 1/10 volume 1×SDS-PAGE treatment buffer. This pre-induced sample is frozen at −20° C. for later use in western blots. The remaining broth is then amended to 1 mM IPTG and incubated 4 hours at 37° C. Induced pellet samples are collected at hourly intervals. These samples and the pre-induced control are run in standard SDS-PAGE gels and electroblotted onto PVDF membrane. The membranes are then processed as western blots using a 1/5000 dilution of monoclonal mouse α-HisTag® primary antibodies followed by HRP-conjugated goat α-mouse IgG secondary antibodies. Bands are visualized colorimetrically using BioRad's Opti-4CN substrate kit. Presence of His tagged bands in the induced samples, but not in uninduced controls, confirms successful expression and comparison of bands from the hourly time points are used to optimize induction parameters in later, larger-scale purifications.

### Production and Purification of Recombinant Proteins

[0107] Expression strains are grown to an OD₆₀₀ of 0.6 to 0.8 in 500 ml or 1 liter broths of tuner medium.

[0108] At this point a non-induced sample is collected and the remaining culture induced by addition of 100 mM IPTG to a final concentration of 1 mM. Induction is carried out for four hours at 37° C. or for 16 hours at 25° C. Culture pellets are harvested and frozen overnight at −20° C. for storage and to aid cell lysis. Pellets are then thawed on ice for 10 minutes and transferred to pre-weighed falcon tubes and weighed. The cells are then rocked for 1 hour at 25° C. in 4 ml of lysis buffer (8M Urea, 100 mM NaH₂PO₄, 25 mM Tris, pH 8.0) per gram wet pellet weight. The lysates are centrifuged for 30 minutes at 15,000 g to pellet cell debris. The cleared lysate (supernatant) is pipetted into a clean falcon tube, where 1 ml of QIAGEN 50% Nickel-NTA resin is added for each 4 ml cleared lysate. This mixture is gently agitated for 1 hour at room temperature to facilitate binding between the Ni²⁺ ions on the resin and the His tags of the recombinant protein. After binding, the slurry is loaded into a disposable mini column and the flow thru (depleted lysate) is collected and saved for later evaluation. The resin is washed twice with lysis buffer that has been adjusted to pH 7.0; the volume of each of these washes is equal to the original volume of cleared lysate. The flow thru of these two washes is also saved for later analysis in western blots to evaluate purification efficiency.

[0109] At this point the columns contain relatively purified recombinant proteins which are immobilized by the His tags at their C-terminus. This is an ideal situation for refolding, so the column is moved to a 4° C. room and a series of renaturation buffers with decreasing urea concentrations are passed through the column. The renaturation buffers contain varying amounts of urea in 25 mM Tris pH 7.4, 500 mM NaCl, and 20% glycerol. This buffer is prepared as stock solutions containing 6M, 4M, 2M and 1M urea. Aliquots of these can be easily mixed to obtain 5M and 3M urea concentrations thus providing a descending series of urea concentrations in 1M steps. One volume (the original lysate volume) of 6M buffer is passed through the column, followed by one volume of 5M buffer, continuing on to the 1M buffer—which is repeated once to ensure equilibration of the column at 1M urea. At this point the refolded proteins are eluted in 8 fractions of 1/10^{th} original volume using 1M urea, 25 mM Tris pH 7.4, 500 mM NaCl, 20% glycerol containing 250 mM imidazole. The imidazole disrupts the Nickel ion-His tag interaction, thereby releasing the protein from the column.

[0110] Western blots are used to evaluate the amount of His tagged protein in the depleted lysate, the two washes, and the eluted fractions. If there is an abundance of recombinant protein in the depleted lysate and/or washes it is possible to repeat the process and “scavenge” more protein. Eluate fractions that contain the protein of interest are pooled and then concentrated and exchanged into storage buffer (20 mM Tris pH 7.4, 10 mM NaCl, 10% glycerol) using centricon centrifugal ultrafiltration devices (Millipore). The enzyme preparations are then aliquoted and frozen at −80° C. for use in activity assays.

[0111] In various embodiments of this invention, the cellulose degrading enzymes, related proteins and systems containing thereof, of this invention, for example including one or more enzymes or cellulose-binding proteins, have a number of uses. Many possible uses of the cellulases of the present invention are the same as described for other cellulases in the paper “Cellulases and related enzymes in biotechnology” by M. K. Bhat (Biotechnical Advances 18 (2000) 355-383), the subject matter of which is hereby incorporated by reference in its entirety. For examples, the cellulases and systems thereof of this invention can be utilized in food, beer, wine, animal feeds, textile production and laundering, pulp and paper industry, and agricultural industries.

[0112] In one embodiment, these systems can be used to degrade cellulose to produce short chain peptides for use in medicine.

[0113] In other embodiments, these systems are used to break down cellulose in the extraction and/or clarification of fruit and vegetable juices, in the production and preservation of fruit nectars and purees, in altering the texture, flavor and other sensory properties of food, in the extraction of olive oil, in improving the quality of bakery products, in brewing beer and making wine, in preparing monogastic and ruminant feeds, in textile and laundry technologies including “fading” denim material, defibrillation of lyocell, washing garments and the like, preparing paper and pulp products, and in agricultural uses.

[0114] In some embodiments of this invention, cellulose may be used to absorb environmental pollutants and waste spills. The cellulose may then be degraded by the cellulase degrading systems of the present invention. Bacteria that can metabolize environmental pollutants and can degrade cellulose may be used in bioreactors that degrade toxic materials. Such a bioreactor would be advantageous since there would be no need to add additional nutrients to maintain the bacteria—they would use cellulose as a carbon source.

[0115] In some embodiments of this invention, cellulose degrading enzyme systems can be supplied in dry form, in buffers, as pastes, paints, micelles, etc. Cellulose degrading enzyme systems can also comprise additional components such as metal ions, chelators, detergents, organic ions, inorganic ions, additional proteins such as biotin and albumin.

[0116] In some embodiments of this invention, the cellulose degrading systems of this invention could be applied directly to the cellulose material. For example, a system containing one, some or all of the compounds listed in FIGS. 4-11 could be directly applied to a plant or other cellulose containing item such that the system would degrade the plant or other cellulose containing item. As another example, S. degradans could be grown on the plant or other cellulose containing item, which would allow the S. degradans to produce the compounds listed in FIGS. 4-11 in order to degrade the cellulose containing item as the S. degradans grows. An advantage of using the S. degradans or systems of this invention is that the degradation of the cellulose containing plant or item can be conducted in a marine environment, for example under water.

[0117] It is one aspect of the present invention to provide a nucleotide sequence that has a homology selected from 100%, 99%, 98%, 97%, 96%, 95%, 90%, 85%, 80%, or 75% to any of the sequences of the compounds listed in FIGS. 4-11

[0118] The present invention also covers replacement of between 1 and 20 nucleotides of any of the sequences of the compounds listed in FIGS. 4-11 with non-natural or non-standard nucleotides for example phosphorothioate, deoxyinosine, deoxyuridine, isocytosine, isoguanosine, ribonucleic acids including 2-O-methyl, and replacement of the phosphodiester backbone with, for example, alkyl chains, aryl groups, and protein nucleic acid (PNA).

[0119] It is another aspect of some embodiments of this invention to provide a nucleotide sequence that hybridizes to any one of the sequences of the compounds listed in FIGS. 4-11 under stringency condition of 1×SSC, 2×SSC, 3×SSC1, 4×SSC, 5×SSC, 6×SSC, 7×SSC, 8×SSC, 9×SSC, or 10×SSC.

[0120] The scope of this invention covers natural and non-natural alleles of any one of the sequences of the compounds listed in FIGS. 4-11. In some embodiments of this invention, alleles of any one of any one of the sequences of the compounds listed in FIGS. 4-11 can comprise replacement of one, two, three, four, or five naturally occurring amino acids with similarly charged, shaped, sized, or situated amino acids (conservative substitutions). The present invention also covers non-natural or non-standard amino acids for example selenocysteine, pyrrolysine, 4-hydroxyproline, 5-hydroxylysine, phosphoserine, phosphotyrosine, and the D-isomers of the 20 standard amino acids.

[0121] Some embodiments of this invention are directed to a method for producing ethanol from lignocellulosic material, comprising treating lignocellulosic material with an effective saccharifying amount of one or more compounds listed in FIGS. 4-11, preferably cellulase cel5A listed in FIG. 4, to obtain saccharides and converting the saccharides to produce ethanol. The treating may be conducted in a marine environment, such as under water. The one or more compounds listed in FIGS. 4-11 may be present in dry form, in a buffer, or in the form of a paste, paint, or micelle.

[0122] Conversion of sugars to ethanol and recovery may be accomplished by, but are not limited to, any of the well-established methods known to those of skill in the art. For example, through the use of an ethanologenic microorganism, such as Zymomonas, Erwinia, Klebsiella, Xanthomonas, and Escherichia, preferably Escherichia coli K011 and Klebsiella oxytoca P2.

[0123] In further aspects of the present invention, the lignocellulosic material is treated with an effective saccharifying amount of all of the compounds listed in FIGS. 4-11.

[0124] In further aspects of the present invention, the one or more compounds listed in FIGS. 4-11 are from Saccharophagus degradans 2-40.

[0125] In further aspects of the present invention, the one or more compounds listed in FIGS. 4-11 are in a system consisting essentially of one or more compounds listed in FIGS. 4-11 or a system further comprising metal ions, chelators, detergents, organic ions, inorganic ions, or one or more additional proteins, such as biotin and/or albumin.

[0126] Some embodiments of this invention are directed to ethanol produced by treating lignocellulosic material with an effective saccharifying amount of one or more compounds listed in FIGS. 4-11 to obtain saccharides and converting the saccharides to produce ethanol. Conversion of sugars to ethanol and recovery may be accomplished by, but are not limited to, any of the well-established methods known to those of skill in the art. For example, through the use of an ethanologenic microorganism, such as Zymomonas, Erwinia, Klebsiella, Xanthomonas, and Escherichia, preferably Escherichia coli K011 and Klebsiella oxytoca P2.

[0127] Further embodiments of this invention are directed to a method for producing ethanol from lignocellulosic material, comprising contacting lignocellulosic material with a microorganism expressing an effective saccharifying amount of one or more compounds listed in FIGS. 4-11, preferably cellulase cel5A listed in FIG. 4, to obtain saccharides and converting the saccharides to produce ethanol. The contacting may be conducted in a marine environment, such as under water. The microorganism may be Saccharophagus degradans 2-40 or a recombinant microorganism containing a chimeric gene comprising at least one polynucleotide encoding a polypeptide comprising an amino acid sequence of at least one of the compounds listed in FIGS. 4-11; wherein the gene is operably linked to regulatory sequences that allow expression of the amino acid sequence by the microorganism. The recombinant microorganism, may be a bacteria or yeast, such as Escherichia coli. In some aspects of the present invention, the recombinant microorganism is an ethanologenic microorganism, such as microorganisms from the species Zymomonas, Erwinia, Klebsiella, Xanthomonas, and Escherichia, preferably Escherichia coli K011 and Klebsiella oxytoca P2.

[0128] Further aspects of the present invention are directed to ethanol produced by contacting lignocellulosic material with a microorganism expressing an effective saccharifying amount of one or more compounds listed in FIGS. 4-11 to obtain saccharides and converting the saccharides to produce ethanol.

[0129] A further aspect of the invention is directed to a method for producing ethanol from lignocellulosic material, comprising contacting lignocellulosic material with an ethanologenic microorganism expressing an effective saccharifying amount of one or more compounds listed in FIGS. 4-11 to produce ethanol. The ethanologenic microorganism expresses an effective amount of one or more compounds listed in FIGS. 4-11 to saccharify the lignocellulosic material and an effective amount of one or more enzymes or enzyme systems which, in turn, catalyze (individually or in concert) the conversion of the saccharides (e.g., sugars such as xylose and/or glucose) to ethanol. The one or more enzymes or enzyme systems of the ethanologenic organism may be expressed naturally or by, but not limited to, any of the methods known to those of skill in the art. For example, release of the one or more enzymes or enzyme systems may be obtained through the use of ultrasound. In some aspects of the present invention, the ethanologenic microorganism is transformed in order to be able to express one or more of the compounds listed in FIGS. 4-11. In some aspects of the present invention, the ethanologenic microorganism is from the species Zymomonas, Erwinia, Klebsiella, Xanthomonas, and Escherichia, preferably Escherichia coli K011 and Klebsiella oxytoca P2.

[0130] It is to be understood that while the invention has been described above using specific embodiments, the description and examples are intended to illustrate the structural and functional principles of the present invention and are not intended to limit the scope of the invention. On the contrary, the present invention is intended to encompass all modifications, alterations, and substitutions within the spirit and scope of the appended claims.

[0131] Analysis of the genome sequence predicts this bacterium produces at least 12 endoglucanases, 1 cellobiohydrolase, 2 cellodextrinases, 3 cellobiases, 7 xylanases, 10 “arabinases”, 5 mannases, and 14 pectinases. Analysis of zymograms and proteomic analyses of cultures revealed subsets of these enzymes are induced during growth on each of the aforementioned substrates. Induction of specific enzymes was assessed by qRT-PCR. Nomenclature for specific enzymes is explained in further detail in U.S. application Ser. No. 11/121,154, filed on May 4, 2005 and published as U.S. Publication No. 2006/0105914, which is incorporated herein in its entirety.

[0132] S. degradans effectively degrades plant material and therefore products that are constructed of plant material. Thus, the induction of the mixture of enzymes expressed in S. degradans upon exposure to a particular plant material shows that the individual enzymes and the mixture of enzymes are effective in the degradation of the plant material that the S. degradans is exposed to. This means that any two or more enzymes with increased or maintained high expression in S. degradans in response to exposure to a given plant material may be used to form an enzyme mixture for the degradation of that plant material. Two types of plant material that S. degradans is effective in degrading to simple sugars are plant material rich in cellulose and hemicellulose. Enzyme systems for degrading these two types of carbohydrates are described in greater detail below.

### Cellulose

[0133] S. degradans 2-40 expresses many enzymes for the degradation of cellulose to simple sugars. For example, in the presence of corn leaves, the celluloytic enzymes shown in Table 1, below were increased.

TABLE 1
Predicted cellulases and accessory enzymes of S. degradans
strain 2-40 and evidence supporting their identification.

| Name | Predicted function | Module(s) | MM(kDa) |
|---|---|---|---|
| Cel5A | Endo-1,4-β-glucanase (EC 3.2.1.4) | GH5/CBM6/CBM6/CBM6/GH5 | 127.2 |
| Cel5B | Endo-1,4-β-glucanase | LPB/PSL(47)/CBM6/GH5 | 60.8 |
| Cel5C | Endo-1,4-β-glucanase | LPB/PSL(47)/GH5 | 49.1 |
| Cel5D | Endo-1,4-β-glucanase | CBM2/PSL(58)/CBM10/PSL(36)/GH5 | 65.9 |
| Cel5E | Endo-1,4-β-glucanase | CBM6/CBM6/GH5 | 72.6 |
| Cel5F | Endo-1,4-β-glucanase | GH5 | 42.0 |
| Cel5G | Endo-1,4-β-glucanase | GH5/PSL(21)/CBM6/PSL(32)/Y95 | 67.9 |
| Cel5H | Endo-1,4-β-glucanase | GH5/PSL(32)/CBM6/EPR(16) | 66.9 |
| Cel5I | Endo-1,4-β-glucanase | CBM2/PSL(33)/CBM10/PSL(58)/GH5 | 77.2 |
| Cel5J | Endo-1,4-β-glucanase | GH5/CBM6/CBM6 | 65.2 |
| Cel6A | Cellobiohydrolase (EC 3.2.1.91) | CBM2/PSL(43)/CBM2/PSL(85)/GH6 | 81.9 |
| Cel9A | Endo-1,4-β-glucanase | GH9 | 62.7 |
| Cel9B | Endo-1,4-β-glucanase | GH9/PSL(54)/CBM10/PSL(50)/CBM2 | 89.5 |
| Ced3A | Cellodextrinase (EC 3.2.1.74) | LPB/GH3/PLP | 116.0 |
| Ced3B | Cellodextrinase | LPB/GH3 | 92.9 |
| Bgl1A | Cellobiase (EC 3.2.1.21) | GH1 | 52.8 |
| Bgl1B | Cellobiase | GH1 | 49.8 |
| Bgl3C | Cellobiase | LPB/GH3/UNK(511) | 95.4 |
| Cep94A | Cellobiose phosphorylase (EC 2.4.1.20) | GH94 | 91.7 |
| Cep94B | Cellodextrin phosphorylase (EC 2.4.1.49) | GH94 | 88.7 |

[0134] Enzymes that are increased in expression by S. degradans in the presence of corn leaves are likely necessary for the digestion of corn leaves to sugar. Thus, the enzymes that were increased over 20 fold, i.e. cel5F, cel5H are effective in degradation of corn leaves. Further, a mixture of all or any smaller number of the cellulolytic enzymes shown in Table 1, combined in proportion or inverse proportion to the increase of expression shown in Table 1, or the relative expression shown in FIG. 3, are used to make an enzyme mix effective for the degradation of corn leaves. Corresponding mixes are made for glucose, newsprint or Avicel™, using the information shown in Table 1. Further, mixtures for other plant materials are made through the exposure of S. degradans to the plant material and detection of the expression of degradation enzymes through detecting the RNA, protein or activity levels of the degradation enzymes.

[0135] Moreover, the following enzymes were induced as shown below in Table 2 in S. degradans when exposed to Avicel™, microcrystalline cellulose in a chemically pure form, for 10 hours.

TABLE 2
Fold increase in enzymes after 10 hours growth of
S. degradans strain 2-40 on Avicel ™.

Fold Increase after 10 h Growth on Avicel

| Basal | Low | Medium | High |
|---|---|---|---|
| Expression | (<5) | (5-25) | (>25) |
| Low (<1% GK) | | cel5C | cel5E |
| | | cel5D | cel5F |
| | | ced3A | cel5H |
| | | | cel6A |
| | | | cel9B |
| Medium (2-10%) | cel5A | cel5B | cel5I |
| | cel5G | cel5J | bgl3C |
| | | cel9A | cep94A |
| | | ced3B | |
| High (>10%) | bgl1A | cep94B | |
| | bgl1B | | |

MAX EXPRESSION: CON 2 H 4-10 H 24 H

[0136] It appears that cel5A, cel5G, cel9A, cel5B, ced3B, bgl1A and cep94B are constituitively expressed in S. degradans 2-40. After 2 hours of growth on Avicel™, cel9A expression increases. This is followed by an increase in cel5F expression at 4 hours, and increases in cel5H and cel5I expression at 10 hours. Cel5I continues to be overexpressed even at 24 hours of culture on Avicel™

[0137] It has also been shown that Cel5I and Cel5H are particularly important for the degradation of cellulose. Cel5I is induced over 500 fold and cel5H over 100 fold when S. degradans 2-40 is exposed to cellulose (FIG. 4). Moreover, cel5H is expressed over 500 fold when S. degradans 2-40 is exposed to cellodextrins, such as cellobiose, cellotraose and cellodextrin (FIG. 5). Thus, either of these proteins could be used to efficiently break down cellulose to simple sugars.

[0138] Further, degradation enzymes with higher expression in S. degradans when exposed to a particular plant material, may be constitutively and/or over-expressed in an engineered bacterium, thus making a bacterium that is effective in the degradation of the particular plant material. For example, mixtures of proteins that are shown to be induced in S. degradans in the presence of corn leaves in Table 1, could be introduced into a bacteria so that they are constitutively expressed. These proteins could also be introduced so they are expressed at a high rate. These engineered bacteria are then used to degrade plant material, in this example, corn leaves. In one embodiment the bacterium to be engineered is S. degradans. In another embodiment, the bacterium to be engineered is E. coli.

### Hemicellulose

[0139] S. degradans 2-40 expresses many enzymes for the degradation of hemicellulose to simple sugars. Hemicellulose exists as short branched chains of sugar monomers. Sugars that make up hemicellulose include xylose, mannose, galactose, and/or arabinose. Hemicellulose forms a series of crosslinks with cellulose and pectin to form a rigid cell wall. Unlike cellulose, hemicellulose is mostly amorphous, relatively weak and susceptible to hydrolization.

[0140] S. degradans produces many hemicellulases that are used to break down hemicellulose to simpler sugars. As shown in FIG. 6, expression of xyn10A, xyn10B, xyn10D, xyn11A and xyn11B is omduced in S. degradans 2-40 grown on xylan, containing hemicellulose. Moreover, as shown in FIG. 7, expression of xyn10A, xyn10B, xyn10D, xyn11A and xyn11B was shown after 10 hours of culture of S. degradans 2-40 on xylan. However, at 2 hours, the greatest increases in expression were for xyn11A and xyn11B, while the greatest increases in expression at 4 hours of culture of S. degradans 2-40 on xylan was xyn10A.

[0141] Thus, Xyn10a, Xyn10b, Xyn10d, Xyn11a And Xyn11b are all important for hemicellulose break down to simpler sugars. However, particular emphasis should be placed on the importance of Xyn10a, Xyn10b, Xyn11a And Xyn11b.

Enhanced Cellulase Expression in S. degradans

[0142] Bacteria are thought to degrade cellulose by using either a complexed or noncomplexed cellulolytic system composed of endoglucanases, cellobiohydrolases and β-glucosidases. The marine bacterium Saccharophagus degradans 2-40 produces a multi-component cellulolytic system that is unusual in the abundance of GH5-containing endoglucanases and β-glucosidases. Although secreted enzymes of this bacterium produce high levels of cellobiose, there is an apparent deficiency of processive enzymes, such as cellobiohydrolases. Each of the 10 annotated GH5-containing cellulases were cloned into pET28b and expressed in E. coli Rossetta2™ (DE3) to establish function. After purification to near homogeneity, all but Cel5C and Cel5I, either as the full-length polypeptide or a derivative sufficient to carry the catalytic domain, exhibited cellulase activity in zymograms consistent with their annotation as endoglucanases. One cellulase, Cel5H, showed significantly greater activity on several types of cellulose and primarily released cellobiose during digestions. The activity was processive as the ratio of soluble to insoluble products was greater than 4 irrespective of the length of digestion and resided with the catalytic domain. The processivity coupled with viscosity reduction of carboxymethyl cellulose solutions and synergisms with known cellulases indicates that Cel5H is a processive endoglucanase. Phylogenetic analyses indicated that Cel5H is a member of a separate clade of GH5-containing enzymes that also included Cel5G and Cel5J. These enzymes were also found to be processive endoglucanases whereas the other GH5 cellulases of S. degradans were classical endoglucanases forming cellodextrins. The high activity and expression of the S. degradans processive endoglucanases enables this bacterium to degrade cellulose to cellobiose independently of cellobiohydrolases.

[0143] The noncomplexed and complexed cellulolytic systems of microorganisms generally rely upon the activity of endoglucanases and cellobiohydrolases to solubilize cellulose to cellodextrins and cellobiose that are then converted to glucose or glucose 1-phosphate by the activity of β-glucosidases or cellobiose phosphorylases. Some exceptions to this model had been noted in bacterial systems that appear to lack or have deficiencies in cellobiohydrolases. (Wilson, D. B. (2008) Ann NY Acad Sci 1125:289-297). An example is the S. degradans cellulolytic system that was predicted to produce an unusual abundance of GH5 endoglucanases but has a comparative deficiency in annotated cellobiohydrolases (Taylor et al (2006) J Bacteriol 188:3849-3861). Cellobiose, however, appeared to be an early product of cellulose degradation. Thus, it was not apparent how the enzymes of the S. degradans cellulolytic system interact to solubilize and metabolize cellulose. The results presented here indicate that the S. degradans cellulolytic system utilizes a novel set of processive GH5 endoglucanases (Cel5G, Cel5H and Cel5J) to substitute for the apparent deficiency in cellobiohydrolase activity. In this model, the activity of processive endoglucanases release cellobiose from cellulose independently of classical endoglucanases. Thus the processive endoglucanases coupled with the activity of β-glucosidases or cellobiose phosphorylase are sufficient for this bacterium to metabolize cellulose.

[0144] The identification of Cel5G, Cel5H and Cel5J as processive endoglucanases acting on the β-1-4 bonds linking cellobiose units is supported by the constant ratio of soluble to insoluble products formed during reaction time courses, the release of cellobiose from pNP-cellobioside and the phylogenetic segregation of these enzymes from classic GH5 endoglucanases. Unlike classical endoglucanases that randomly cleave cellulose polymers to form a variety of degradation products, these enzymes appeared to primarily release cellobiose from a variety of cellulose substrates. Although this is not demonstrative of processivity due to the turnover rates of these enzymes (Horn, S. J. et al (2006) Proc Natl Acad Sci USA 103:18089-18094), greater than 80% of the reaction products formed by Cel5H activity were soluble, irrespective of the reaction time. Thus, S. degradans Cel5H, Cel5G and Cel5J exhibited processivity values (ratio of soluble to insoluble reaction products) in excess of 4. The processivity values reported for T. fusca Cel9A, an extensively characterized processive endoglucanase range from 3.1 to 7.0 (Li et al. (2007) Appl Environ Microbiol 73:3165-3172; Irwin et al. (1993) Biotechnol and Bioeng 42:1002-1013). In contrast, the T. fusca classic endoglucanase, Cel6A, only released twice as much soluble sugar as insoluble sugar. (Zhang et al. (2000) Eur J Biochem 267:244-252). Therefore, the processivity values for S. degradans Cel5H, Cel5G and Cel5J were most similar to that of the processive T. fusca Cel9A.

[0145] The identification of S. degradans Cel5H, Cel5G and Cel5J as endoglucanases is best supported by the effect of these enzymes on the viscosity of CMC solutions and the synergisms detected with a known exoglucanase. Exoglucanases have little effect on the overall degree of polymerization of CMC and its inherent viscosity whereas endoglucanases substantially reduce the degree of polymerization through random cleavage of the polymer with a corresponding decrease in viscosity. S. degradans Cel5H, Cel5G and Cel5J all rapidly reduced the viscosity of CMC solutions similarly to an endoglucanase. Endoglucanases act synergistically with exoglucanases by increasing the number of available ends. (Jeoh et al. (2006) Biotechnol Progr 22:270-277). As expected for endoglucanases, S. degradans Cel5H, Cel5G and Cel5J were synergistic with the known exoglucanase, T. fusca Cel6B. The absence of synergism with endoglucanases argues that the processive GH5 enzymes of S. degradans are not dependent upon other endoglucanases for activity and therefore lack cellobiohydrolase activity.

[0146] The processivity of the GH5 enzymes of S. degradans is unusual. In bacterial systems, processive endoglucanases have almost exclusively been found in the GH9 family. (Wilson, D. B. (2008) Ann NY Acad Sci 1125:289-297). Processive endoglucanase activity, however, has been suggested for another member of the GH5 family, Cel5A produced by the brown rot basidiomycete Gloeophyllum trabeum. (Cohen et al. (2005) Appl Environ Microbiol 71:2412-2417). As such, the processive endoglucanases of S. degradans should have distinctive structures. The catalytic sites of processive enzymes are typically associated with either tunnel conformations that enclose the substrate during catalysis or are located in deep clefts that partial enclose the substrate. (Breyer, W. A. and Matthews, B. W. (2001) Protein Sci 10:1699-1711). The catalytic sites of GH5 enzymes are cleft enzymes and the 7 residues that form the active site and cleft of the GH5 domains of Cel5G, Cel5H and Cel5J are conserved. (Ducros, V. et al (1995) Structure 3:939-949; Violot, S. et al (2005) J Mol Biol 348:1211-1224; Gilad, R. et al (2003) J Bacteriol 185:391-398). Phylogenetic analysis, however, revealed that other aspects of the primary sequence of these enzymes are sufficiently divergent to allow their segregation from the other families of GH5 cellulases found in S. degradans and other microorganisms. This infers that these enzymes have a distinct structure relative to other GH5 enzymes. As the GH5 cleft appears to be conserved in these enzymes, induced fit with the substrate could explain the processivity of these enzymes.

[0147] The processivity of most endoglucanases is dependent upon their associated CBM module. For example, the processivity of several bacterial GH9 cellulases is dependent upon the resident CBM3 (Gilad, R. et al (2003) J Bacteriol 185:391-398; Sakon et al. (1997) Nat Struct Biol 4:810-818). The processive GH5 cellulases of S. degradans are all linked to CBM6 modules via flexible linkers. (Howard, M. B. et al (2004) Protein Sci 13:1422-1425). These CBM6 modules exhibit properties typical of a Type B CBM that binds to individual polysaccharide chains and is consistent with the substrate bias of these enzymes towards amorphous cellulose as demonstrated by the high activity on CMC and PASC and the inability to breakdown cotton linters. The CBM6, however, was not necessary for activity or processivity. The truncated derivative of Cel5H, Cel5H′, retained greater than 78% of its activity on CMC, but did show a significant loss of activity on insoluble substrates. For example, the CBM6 was shown to contribute in the degradation of cotton linters, but while only acting on the amorphous regions of the substrate. The ratio of soluble to insoluble reducing sugars was not affected by the deletion of the CBM6.

[0148] Other systems lacking cellobiohydrolases have also been discovered where the role of processive endoglucanases is not well understood. (Wilson, D. B. (2008) Three microbial strategies for plant cell wall degradation. Ann NY Acad Sci 1125:289-297). For example, the cellulolytic system of Cytophaga hutchinsonii appears to be composed of 9 candidate endoglucanases containing either a GH5 or GH9 domain and 4 candidate β-glucosidases (Xie, G. et al (2007) Appl Environ Microbiol 73:3536-3546). Cellobiohydrolases are not obvious in this system. A similar system appears to be found in Fibrobacter succinogenes that contains five cellulases including Cel9D. (Qi et al. (2007) Appl Environ Microbiol 73:6098-6105). Cel9D is interesting in that it exhibits a wide range of synergistic interactions with other members of its own family. (Qi et al. (2008) J Bacteriol 190:1976-1984). C. hutchinsonii, F. succinogenes, and S. degradans all share the property of having a large number of predicted endoglucanases with relatively few cellobiohydrolases. Processive enzymes would enable these organisms to solubilize cellulose.

[0149] S. degradans degrades cellulose by at least two distinct mechanisms involving secreted GH5 cellulases. The primary mechanism appears to be through the activity of the processive endoglucanases that form cellobiose. The processive endoglucanases have the highest specific activity of the tested endoglucanases and are highly expressed. The high expression and activity of these enzymes explains the formation of cellobiose as the primary product of cellulose digestion by culture filtrates of S. degradans. Most likely this cellobiose is transported into the cell by a presently unknown transporter and convert to glucose by the activity of the cytoplasmic β-glucosidases Bgl1A or Bgl1B. A homolog to a cellobiose phosphorylase is also present in the genome opening the possibility of phosphorylytic cleavage to glucose 1-phosphate and glucose. At a lower rate, classic endoglucanases form cellodextrins that could be converted to glucose by the activity of the cellobiohydrolase Cel6A, the cellodextrinases Ced3A and Ced3B or the surface-associated β-glucosidase Bgl3C. This combination of mechanisms which utilizes processive endoglucanases, and a possible secondary mechanism utilizing phosphorylase activity to degrade cellulose, makes S. degradans a remarkable cellulolytic system.

[0150] This invention relates to a host cell (e.g., bacterium) modified to express one or more saccharifying enzymes such as processive endoglucanases. According to preferred embodiments, the host cell is modified to express the processive endoglucanases of Cel5A, Cel5G, Cel5H, Cel5J, and combinations and mixtures thereof. Cel5A, Cel5G, Cel5H, Cel5J are processive endoglucanases acting on the β-1-4 bonds. Cel5A is encoded by the nucleic acid sequence shown in the region of 3828980-3832483 of GenBank Accession No. NC_{—}007912. The GeneID is 3967764. The Cel5A protein is shown at GenBank Accession No. YP_{—}528472. Cel5G is encoded by the nucleic acid sequence shown in the region of 4130713-4132629 of GenBank Accession No. NC_{—}007912. The GeneID is 3965729. The Cel5G protein is shown at GenBank Accession No. YP_{—}528708. Cel5H is encoded by the nucleic acid sequence shown in the region of 4125970-4127862 of GenBank Accession No. NC_{—}007912. The GeneID is 3965710. The Cel5H protein is shown at GenBank Accession No. YP_{—}528706.1. Cel5J is encoded by the nucleic acid sequence shown in the region of 3151734-3153566 of GenBank Accession No. NC_{—}007912. The GeneID is 3968571. The Cel5J protein is shown at GenBank Accession No. YP_{—}527966.1.

[0151] In another preferred embodiment, a host cell is modified with a nucleic acid that expresses a homolog of Cel5A, Cel5G, Cel5H, or Cel5J. The isolated nucleic acid homolog of the invention comprises a nucleotide sequence which is at least about 40-60%, preferably at least about 60-70%, more preferably at least about 70-75%, 75-80%, 80-85%, 85-90%, or 90-95%, and even more preferably at least about 95%, 96%, 97%, 98%, 99%, or more identical to a nucleotide sequence that encodes any of Cel5A, Cel5G, Cel5H, or Cel5J.

[0152] The processive endoglucanases of the present invention act synergistically with exoglucanases by increasing the number of available ends. Accordingly, the host cell may be a cell that expresses or is known to express exoglucanases. According to some embodiments, the host cell may be modified to express one or more exoglucanases. In one preferred embodiment, the host cell is genetically modified to express both a processive endonuclease, for example, Cel5G, Cel5H and/or Cel5J as well as a beta-glucosidase, for example Bgl1A, Bgl1B, Bgl3C, Ced3A and/or Ced3B. Preferably, the host cell is a bacterial, plant, fungal or insect cell. In certain embodiments, the processive endonuclease or beta-glucosidase is a full length protein. In other embodiments, the processive endonuclease and/or beta-glucosidase lacks its N-terminus so that it cannot be secreted from the host cell. Preferably, the proteins lack their N-terminal signal peptide. In other embodiments, the processive endonuclease and/or beta-glucosidase only include the catalytic domain.

[0153] This invention relates to a host cell (e.g., bacterium) modified to express one or more saccharifying enzymes such as beta-glucosidases. According to preferred embodiments, the host cell is modified to express the beta-glucosidases of Bgl1A, Bgl1B, Bgl3C, Ced3A and/or Ced3B, and combinations and mixtures thereof. Bgl1A is encoded by the nucleic acid sequence shown in region 4563392-4564777 of GenBank Accession No. NC_{—}007912. The GeneID is 3966465. The Bgl1A protein is shown at GenBank Accession No. YP_{—}529070.1. Bgl1B is encoded by the nucleic acid sequence shown in the region complementary to 1805639-1806973 of GenBank Accession No. NC_{—}007912. The GeneID is 3968663. The Bgl1B protein is shown at GenBank Accession No. YP_{—}526868.1. Bgl3C is encoded by the nucleic acid sequence shown in th region of 3391161-3393761 of GenBank Accession No. ACCESSION NC_{—}007912. The GeneID is 3968493. The Bgl3C protein is shown at GenBank Accession No. YP_{—}528146.1. Ced3A is encoded by the nucleic acid sequence shown in the region complementary to 3155564-3158782 of GenBank Accession No. NC_{—}007912. The GeneID is 3968574. The Ced3A protein is shown at GenBank Accession No. YP_{—}527969.1. Ced3B is encoded by the nucleic acid sequence shown in the region complementary to 307565-310153 of GenBank Accession No. NC_{—}007912. The GeneID is 3968087. The Ced3B protein is shown at GenBank Accession No. YP_{—}525721.1.

[0154] In another preferred embodiment, a host cell is modified with a nucleic acid that expresses a homolog of Bgl1A, Bgl1B, Bgl3C, Ced3A and/or Ced3B. The isolated nucleic acid homolog of the invention comprises a nucleotide sequence which is at least about 40-60%, preferably at least about 60-70%, more preferably at least about 70-75%, 75-80%, 80-85%, 85-90%, or 90-95%, and even more preferably at least about 95%, 96%, 97%, 98%, 99%, or more identical to a nucleotide sequence shown above. The nucleic acid sequence may be modified so that the N-terminus is truncated. More specifically, the nucleic acid may be modified so that the N-terminal signal sequence is truncated. The nucleic acid sequence may also be modified so that only the catalytic domain of the protein is expressed.

[0155] According to some embodiments, the host cell is a marine γ-proteobacterium. According to preferred embodiments, the marine γ-proteobacterium is Saccharophagus degradans. The preferred strain of Saccharophagus degradans is the S. degradans strain 2-40 having the American Type Culture Collection accession number 43961. S. degradans is further described in: WO 2008/136997; WO 2008/033330; U.S. Patent Publication No. 2005/0136426; U.S. Patent Publication No. 2007/0292929; U.S. Pat. No. 7,384,772; and U.S. Pat. No. 7,365,180; the disclosures of which are incorporated herein by reference in their entireties. In certain preferred embodiments, S. degradans is transfected with an incQ plasmid (belonging to the incompatibility group Q). These plasmids include the plasmid pDSK600, among others. Preferably, the incQ plasmid provides resistance to kanamycin and/or spectinomycin. In certain embodiments, the promoter used with incQ plasmid is the 3xlacUV5 promoter. In other embodiments, the incQ plasmid, preferably the pDSK600 plasmid, is used with any inducible promoter that can regulate expression. In other embodiments, the expression vector for a

[0156] The present invention features a genetically modified host cell that overexpresses one or more processive endoglucanases (e.g., Cel5G, Cel5H, Cel5J, and combinations and mixtures thereof), the genetically modified host cell comprising one or more genetic modifications that provide for an increased level of processive endoglucanase activity.

[0157] The genetic modifications provide for production of processive endoglucanases at a level that is at least about 5% higher (e.g., from about 5% higher to 10³-fold, or more, higher) than the level of the processive endoglucanase in a control cell not comprising the genetic modification(s). According to some embodiments, the genetic modifications provide for production of processive endoglucanases at a level that is at least about 10% higher, at least about 50% higher, at least about 2-fold higher, at least about 3-fold higher, at least about 4-fold higher, at least about 5-fold higher, at least about 10-fold higher, at least about 20-fold higher, at least about 30-fold higher, at least about 40-fold higher, at least about 50-fold higher, at least about 60-fold higher, at least about 70-fold higher, at least about 80-fold higher, at least about 90-fold higher, at least about 100-fold higher, at least about 200-fold higher, at least about 300-fold higher, at least about 400-fold higher, or at least about 500-fold higher.

[0158] The genetic modifications provide for production of processive endoglucanases at a level that is at least about 5% higher (e.g., from about 5% higher to 10³-fold, or more, higher) than the level of the processive endoglucanase in a control cell not comprising the genetic modification(s). According to some embodiments, the genetic modifications provide for production of processive endoglucanases at a level that is at least about 10% higher, at least about 50% higher, at least about 2-fold higher, at least about 3-fold higher, at least about 4-fold higher, at least about 5-fold higher, at least about 10-fold higher, at least about 20-fold higher, at least about 30-fold higher, at least about 40-fold higher, at least about 50-fold higher, at least about 60-fold higher, at least about 70-fold higher, at least about 80-fold higher, at least about 90-fold higher, at least about 100-fold higher, at least about 200-fold higher, at least about 300-fold higher, at least about 400-fold higher, or at least about 500-fold higher.

[0159] DNA sequences encoding the saccharifying enzymes may be cloned into any suitable vectors for expression in intact host cells or in cell-free translation systems by methods well-known in the art. The particular choice of the vector, host, or translation system is not critical to the practice of the invention.

[0160] Several regulatory elements (e.g., promoters) have been isolated and shown to be effective in the transcription and translation of heterologous proteins in the various hosts. Such regulatory regions, methods of isolation, manner of manipulation, etc. are known in the art. Non-limiting examples of bacterial promoters include the β-lactamase (penicillinase) promoter; lactose promoter; tryptophan (trp) promoter; araBAD (arabinose) operon promoter; lambda-derived P₁ promoter and N gene ribosome binding site; and the hybrid tac promoter derived from sequences of the trp and lac UV5 promoters.

[0161] Expression and cloning vectors will likely contain a selectable marker, a gene encoding a protein necessary for survival or growth of a host cell transformed with the vector. The presence of this gene ensures growth of only those host cells that express the inserts. Typical selection genes encode proteins that 1) confer resistance to antibiotics or other toxic substances, e.g., ampicillin, neomycin, methotrexate, etc.; 2) complement auxotrophic deficiencies, or 3) supply critical nutrients not available from complex media, e.g., the gene encoding D-alanine racemase for Bacilli. Markers may be an inducible or non-inducible gene and will generally allow for positive selection. Non-limiting examples of markers include the ampicillin resistance marker (i.e., β-lactamase), tetracycline resistance marker, neomycin/kanamycin resistance marker (i.e., neomycin phosphotransferase), dihydrofolate reductase, glutamine synthetase, and the like. The choice of the proper selectable marker will depend on the host cell, and appropriate markers for different hosts as understood by those of skill in the art.

[0162] Vectors can contain one or more replication and inheritance systems for cloning or expression, one or more markers for selection in the host, e.g., antibiotic resistance, and one or more expression cassettes. The inserted coding sequences can be synthesized by standard methods, isolated from natural sources, or prepared as hybrids. Ligation of the coding sequences to transcriptional regulatory elements (e.g., promoters, enhancers, and/or insulators) and/or to other amino acid encoding sequences can be carried out using established methods.

[0163] Expression vectors for host cells ordinarily include an origin of replication (where extrachromosomal amplification is desired, as in cloning, the origin will be a bacterial origin), a promoter located upstream from the saccharifying enzyme coding sequences, together with a ribosome binding site (the ribosome binding or Shine-Dalgarno sequence is only needed for prokaryotic expression), RNA splice site (if the saccharifying enzyme DNA contains genomic DNA containing one or more introns), a polyadenylation site, and a transcriptional termination sequence. As noted, the skilled artisan will appreciate that certain of these sequences are not required for expression in certain hosts. An expression vector for use with microbes need only contain an origin of replication recognized by the intended host, a promoter which will function in the host and a phenotypic selection gene, for example a gene encoding proteins conferring antibiotic resistance or supplying an auxotrophic requirement.

[0164] Expression vectors, unlike cloning vectors, must contain a promoter which is recognized by the host organism. This is generally a promoter homologous to the intended host. Promoters most commonly used in recombinant DNA constructions include the β-lactamase (penicillinase) and lactose promoter systems (Chang et al., 1978, “Nature”, 275: 615; and Goeddel et al., 1979, “Nature” 281: 544), a tryptophan (trp) promoter system (Goeddel et al., 1980, “Nucleic Acids Res.” 8: 4057 and EPO Appl. Publ. No. 36,776) and the tac promoter (H. De Boer et al., 1983, “Proc. Nat'l. Acad. Sci. U.S.A.” 80: 21-25). While these are the most commonly used, other known microbial promoters are suitable. Details concerning their nucleotide sequences have been published, enabling a skilled worker operably to ligate them to DNA encoding a saccharifying enzyme in plasmid vectors. Promoters for use in prokaryotic expression systems also will contain a Shine-Dalgarno (S.D.) sequence operably linked to the DNA encoding the saccharifying enzymes of the present invention, i.e., the S.D. sequence is positioned so as to facilitate translation.

[0165] Host cells can be transformed, transfected, or infected as appropriate by any suitable method including electroporation, calcium chloride-, lithium chloride-, lithium acetate/polyethylene glycol-, calcium phosphate-, DEAE-dextran-, liposome-mediated DNA uptake, spheroplasting, injection, microinjection, microprojectile bombardment, phage infection, viral infection, or other established methods. Alternatively, vectors containing the nucleic acids of interest can be transcribed in vitro, and the resulting RNA introduced into the host cell by well-known methods, e.g., by injection. The cells into which have been introduced nucleic acids described above are meant to also include the progeny of such cells. Methods of transfection include nucleofection, electroporation, sonoporation, heat shock, magnetofection and proprietary transfection reagents such as Lipofectamine, Dojindo, GenePORTER, Hilymax, Fugene, jetPEI, Effectene or DreamFect.

[0166] Host cells carrying an expression vector (i.e., transformants or clones) are selected using markers depending on the mode of the vector construction. The marker may be on the same or a different DNA molecule, preferably the same DNA molecule. In prokaryotic hosts, the transformant may be selected, e.g., by resistance to ampicillin, tetracycline or other antibiotics. Production of a particular product based on temperature sensitivity may also serve as an appropriate marker.

[0167] It is further preferred that the isolated nucleic acid homolog of the invention encodes a saccharifying enzyme, or portion thereof, that is at least 80% identical to an amino acid sequence of any of Cel5A, Cel5G, Cel5H, or Cel5J, and that functions as a processive endoglucanase. In a more preferred embodiment, overexpression of the nucleic acid homolog in a host cell increases the host cell's yield of cellobiose.

[0168] For the purposes of the invention, the percent sequence identity between two nucleic acid or polypeptide sequences is determined using the Vector NTI 9.0 (PC) software package (Invitrogen, 1600 Faraday Ave., Carlsbad, Calif. 92008). A gap opening penalty of 15 and a gap extension penalty of 6.66 are used for determining the percent identity of two nucleic acids. A gap opening penalty of 10 and a gap extension penalty of 0.1 are used for determining the percent identity of two polypeptides. All other parameters are set at the default settings. For purposes of a multiple alignment (Clustal W algorithm), the gap opening penalty is 10, and the gap extension penalty is 0.05 with blosum62 matrix. It is to be understood that for the purposes of determining sequence identity when comparing a DNA sequence to an RNA sequence, a thymidine nucleotide is equivalent to a uracil nucleotide.

[0169] In another aspect, the invention relates to an isolated nucleic acid comprising a polynucleotide that hybridizes to the polynucleotide of any that encodes any of Cel5A, Cel5G, Cel5H, or Cel5J under stringent conditions. Preferably, an isolated nucleic acid homolog of the invention comprises a nucleotide sequence which hybridizes under highly stringent conditions to the nucleotide sequence that encodes any of Cel5A, Cel5G, Cel5H, or Cel5J and functions as a processive endoglucanase. In a further preferred embodiment, overexpression of the isolated nucleic acid homolog in a host cell increases a host cell's yield of cellobiose.

[0170] As used herein with regard to hybridization for DNA to a DNA blot, the term “stringent conditions” may refer to hybridization overnight at 60° C. in 10×Denhart's solution, 6×SSC, 0.5% SDS, and 100 μg/ml denatured salmon sperm DNA. Blots are washed sequentially at 62° C. for 30 minutes each time in 3×SSC/0.1% SDS, followed by 1×SSC/0.1% SDS, and finally 0.1×SSC/0.1% SDS. In a preferred embodiment, the phrase “stringent conditions” refers to hybridization in a 6×SSC solution at 65° C. As also used herein, “highly stringent conditions” refers to hybridization overnight at 65° C. in 10×Denharts solution, 6×SSC, 0.5% SDS, and 100 μg/ml denatured salmon sperm DNA. Blots are washed sequentially at 65° C. for 30 minutes each time in 3×SSC/0.1% SDS, followed by 1×SSC/0.1% SDS, and finally 0.1×SSC/0.1% SDS. Methods for nucleic acid hybridizations are described in Meinkoth and Wahl, 1984, Anal. Biochem. 138:267-284; Current Protocols in Molecular Biology, Chapter 2, Ausubel et al. Eds., Greene Publishing and Wiley-Interscience, New York, 1995; and Tijssen, 1993, Laboratory Techniques in Biochemistry and Molecular Biology Hybridization with Nucleic Acid Probes, Part I, Chapter 2, Elsevier, N.Y., 1993. Preferably, an isolated nucleic acid molecule of the invention that hybridizes under stringent or highly stringent conditions to a sequence of any that encodes any of Cel5A, Cel5G, Cel5H, or Cel5J and corresponds to a naturally occurring nucleic acid molecule. As used herein, a “naturally occurring” nucleic acid molecule refers to an RNA or DNA molecule having a nucleotide sequence that occurs in nature (e.g., encodes a natural polypeptide). In one embodiment, the nucleic acid encodes a naturally occurring processive endoglucanase.

[0171] Using the above-described methods, and others known to those of skill in the art, one of ordinary skill in the art can isolate homologs of the processive endoglucanases comprising amino acid sequences shown in any of Cel5A, Cel5G, Cel5H, or Cel5J. One subset of these homologs is allelic variants. As used herein, the term “allelic variant” refers to a nucleotide sequence containing polymorphisms that lead to changes in the amino acid sequences of a saccharifying enzyme and that exist within a natural population (e.g., a host cell species or variety). Such natural allelic variations can typically result in 1-5% variance in a saccharifying enzyme nucleic acid. Allelic variants can be identified by sequencing the nucleic acid sequence of interest in a number of different host cells, which can be readily carried out by using hybridization probes to identify the same HSRP genetic locus in those host cells. Any and all such nucleic acid variations and resulting amino acid polymorphisms or variations in a saccharifying enzyme that are the result of natural allelic variation and that do not alter the functional activity of a saccharifying enzyme, are intended to be within the scope of the invention.

[0172] Moreover, nucleic acid molecules encoding processive endoglucanases from the same or other species such as processive endoglucanase analogs, orthologs, and paralogs, are intended to be within the scope of the present invention. As used herein, the term “analogs” refers to two nucleic acids that have the same or similar function, but that have evolved separately in unrelated organisms. As used herein, the term “orthologs” refers to two nucleic acids from different species, but that have evolved from a common ancestral gene by speciation. Normally, orthologs encode polypeptides having the same or similar functions. As also used herein, the term “paralogs” refers to two nucleic acids that are related by duplication within a genome. Paralogs usually have different functions, but these functions may be related. Analogs, orthologs, and paralogs of a naturally occurring HSRP can differ from the naturally occurring HSRP by post-translational modifications, by amino acid sequence differences, or by both. In particular, orthologs of the invention will generally exhibit at least 80-85%, more preferably, 85-90% or 90-95%, and most preferably 95%, 96%, 97%, 98%, or even 99% identity, or 100% sequence identity, with all or part of a naturally occurring processive endoglucanase amino acid sequence, and will exhibit a function similar to a processive endoglucanase. Preferably, a saccharifying enzyme ortholog of the present invention functions as a processive endoglucanases.

[0173] In addition to naturally-occurring variants of a saccharifying enzyme sequence that may exist in the population, the skilled artisan will further appreciate that changes can be introduced by mutation into a nucleotide sequence of any that encodes any of Cel5A, Cel5G, Cel5H, or Cel5J, thereby leading to changes in the amino acid sequence of the encoded processive endoglucanase, without altering the functional activity of the processive endoglucanase. For example, nucleotide substitutions leading to amino acid substitutions at “non-essential” amino acid residues can be made in a sequence of any that encodes any of Cel5A, Cel5G, Cel5H, or Cel5J. A “non-essential” amino acid residue is a residue that can be altered from the wild-type sequence of one of the processive endoglucanases without altering the activity of said processive endoglucanase, whereas an “essential” amino acid residue is required for processive endoglucanase activity. Other amino acid residues, however, (e.g., those that are not conserved or only semi-conserved in the domain having processive endoglucanase activity) may not be essential for activity and thus are likely to be amenable to alteration without altering processive endoglucanase activity.

[0174] Accordingly, another aspect of the invention pertains to nucleic acid molecules encoding processive endoglucanases that contain changes in amino acid residues that are not essential for processive endoglucanase activity. Such processive endoglucanases differ in amino acid sequence from a sequence contained in any that encodes any of Cel5A, Cel5G, Cel5H, or Cel5J, yet retain at processive endoglucanase activity.

[0175] In one embodiment, the isolated nucleic acid molecule comprises a nucleotide sequence encoding a polypeptide, wherein the polypeptide comprises an amino acid sequence at least about 50-60% identical to the sequence of any of Cel5A, Cel5G, Cel5H, or Cel5J, more preferably at least about 60-70% identical to the sequence of any of Cel5A, Cel5G, Cel5H, or Cel5J, even more preferably at least about 70-75%, 75-80%, 80-85%, 85-90%, or 90-95% identical to the sequence of any of Cel5A, Cel5G, Cel5H, or Cel5J, and most preferably at least about 96%, 97%, 98%, or 99% identical to the sequence of any of Cel5A, Cel5G, Cel5H, or Cel5J.

[0176] An isolated nucleic acid molecule encoding a saccharifying enzyme having sequence identity with a polypeptide sequence of any of Cel5A, Cel5G, Cel5H, or Cel5J can be created by introducing one or more nucleotide substitutions, additions, or deletions into a nucleotide sequence that encodes any of Cel5A, Cel5G, Cel5H, or Cel5J, such that one or more amino acid substitutions, additions, or deletions are introduced into the encoded polypeptide. Mutations can be introduced into the sequence that encodes any of Cel5A, Cel5G, Cel5H, or Cel5J by standard techniques, such as site-directed mutagenesis and PCR-mediated mutagenesis. Preferably, conservative amino acid substitutions are made at one or more predicted non-essential amino acid residues. A “conservative amino acid substitution” is one in which the amino acid residue is replaced with an amino acid residue having a similar side chain.

[0177] Families of amino acid residues having similar side chains have been defined in the art. These families include amino acids with basic side chains (e.g., lysine, arginine, histidine), acidic side chains (e.g., aspartic acid, glutamic acid), uncharged polar side chains (e.g., glycine, asparagine, glutamine, serine, threonine, tyrosine, cysteine), nonpolar side chains (e.g., alanine, valine, leucine, isoleucine, proline, phenylalanine, methionine, tryptophan), β-branched side chains (e.g., threonine, valine, isoleucine), and aromatic side chains (e.g., tyrosine, phenylalanine, tryptophan, histidine). Thus, a predicted nonessential amino acid residue in a saccharifying enzyme is preferably replaced with another amino acid residue from the same side chain family. Alternatively, in another embodiment, mutations can be introduced randomly along all or part of a saccharifying enzyme coding sequence, such as by saturation mutagenesis, and the resultant mutants can be screened for a saccharifying enzyme activity described herein to identify mutants that retain processive endoglucanase activity. Following mutagenesis of the sequence of any of Cel5A, Cel5G, Cel5H, or Cel5J, the encoded polypeptide can be expressed recombinantly and the activity of the polypeptide can be determined by analyzing processive endoglucanase as described herein elsewhere.

### Fermentation

[0178] The fermentation process may be carried out using any method known in the art. Fermentation may, therefore, be understood as comprising shake flask cultivation, small- or large-scale fermentation (including continuous, batch, fed-batch, or solid state fermentations) in laboratory or industrial fermenters performed in a suitable medium and under conditions allowing the fermentation of fermentable sugars into ethanol.

[0179] In the fermentation step, sugars, released from the plant cell wall polysaccharides are fermented to one or more organic substances, e.g., ethanol, by a fermentation organism, such as yeast, or fermenting organisms. According to preferred embodiments, the fermentation is carried out simultaneously with the enzymatic hydrolysis in the same vessels, again under controlled pH, temperature and mixing conditions. When saccharification and fermentation are performed simultaneously in the same vessel, the process is generally termed simultaneous saccharification and fermentation. The most widely used process in the art is the simultaneous saccharification and fermentation (SSF) process where there is no holding stage for the saccharification, meaning that the adding of the fermenting microorganism and lysis of the saccharifying microorganism occur in the same vessel.

[0180] During the fermentation stage, the combining of the impregnated pulp and fermenting organisms may be accomplished in a number of ways that one skilled in the art would readily be able to determine. A fermenting organism goes through different stages of growth including a lag phase, logarithmic phase, a stationary phase and a death phase. The length of the lag phase may vary depending on nutrition, growth conditions, temperature, and inoculation density. Also the lag phase may depend on whether or not the fermenting organism, such as yeast were acclimatized or directly added to a fermenter. Generally the lag phase is 6 to 9 hours. If a fermenting organism such as yeast can be kept in an active growth state, production of end products such as alcohol and particularly ethanol could be increased and fermentation time potentially decreased.

[0181] Therefore, in some embodiments the initial fermentation is conducted for a period of time that corresponds to the lag phase of the fermenting organism. In other embodiments, the initial fermentation step is conducted for a period of time between 2 to 40 hours, also between 2 to 30 hours, also between 2 to 25 hours, also between 5 and 20 and between 2 and 15 hours. In some embodiments, the initial fermentation time is greater than 2, 3, 4, 5, 6, 7, 8, 9, 10 or 15 hours but less than 36 hours.

[0182] In some embodiments, the initial fermentation is conducted at a temperature of at least about 5° C., 10° C., 15° C., 20° C., 25° C., 30° C., 35° C., 40° C., 45° C., 50° C., 55° C., 60° C., 65° C., 70° C., and 75° C. and also at a temperature of less than 70° C., less than 65° C. and less than 60° C. In other embodiments, the temperature will be between about 5-65° C., about 10-65° C., about 20-65° C., about 20-60° C., about 20-55° C., about 25-50° C., about 25-45° C., about 30-45° C., about 30-40° C. and about 35-45° C.

[0183] In some embodiments, the initial fermentation is conducted at a pH of between pH 3.0 and 7.0, between pH 3.0 and 6.5, between pH 3.0 and 6.0, between pH 3.0 and 5.0, between pH 3.5 and 5.5, between pH 3.5 and 5.0, between pH 3.5 and 4.5 or between pH 5.0 and 7.0. The exact temperature and pH used in accordance with any of the fermentation steps of the instant process depends upon the specific fermentable substrate and further may depend upon the particular plant variety, enzymes that are being used and the fermenting organism.

[0184] In some embodiments the total fermentation time of the fermentation process will be for about 24 to 336 hours, 24 to 168 hours, 24 to 144 hours, 24 to 108 hours; 24 to 96 hours, 36 to 96 hours, 36 to 72 hours, 48 to 72 hours, 72 to 120 hours, 120 to 168 hours and 168 to 336 hours. In a preferred aspect, the fermentation proceeds for 24-96 hours, such as typically 35-60 hours. In another preferred aspect, the temperature is generally between 26-40° C., in particular about 32° C., and the pH is generally from pH 3 to 6, preferably from about pH 4 to about 5. The fermenting organism are preferably applied in amounts of 10⁵ to 10¹², preferably from 10⁷ to 10¹⁰, especially 5×10⁷ viable cells count per ml of fermentation broth. During the ethanol producing phase the cell count (e.g., yeast cell count) should preferably be in the range from 10⁷ to 10¹⁰, especially around 2×10⁸. Specific examples of fermentation systems used with the invention are disclosed in U.S. Provisional Patent Application No. 61/156,158, filed on Feb. 27, 2009 and incorporated herein by reference in its entirety.

### Recovery

[0185] Following the fermentation, the organic substance of interest is recovered from the mash by any method known in the art. Such methods include, but are not limited to, chromatography (e.g., ion exchange, affinity, hydrophobic, chromatofocusing, and size exclusion), electrophoretic procedures (e.g., preparative isoelectric focusing), differential solubility (e.g., ammonium sulfate precipitation), SDS-PAGE, distillation, or extraction. For example, in an ethanol fermentation, the alcohol is separated from the fermented plant cell wall polysaccharides and purified by conventional methods of distillation. Ethanol with a purity of up to about 96 vol. % ethanol can be obtained, which can be used as, e.g., fuel ethanol; drinking ethanol, i.e., potable neutral spirits; or industrial ethanol. According to preferred methods of ethanol production, following the fermentation the mash is distilled to extract the ethanol.

[0186] The yield of glucose (percent of the total solubilized solids) from a fermentable substrate may be at least about 60%, 65%, 70%, 75%, 80%, 85%, 90%, 91%, 92%, 93%, 94%, 95%, 96%, 97% and 98%. However, in a preferred embodiment, the glucose is continually produced and substantially all of the glucose is used in the process to produce an end-product, such as ethanol. In further embodiments, the final mash will include less than 1.0%, less than 0.8%, less than 0.5%, less than 0.2%, less than 0.15%, less than 0.1%, and less than 0.05% monosaccharides (w/v).

[0187] While the preferred end-product is an alcohol and particularly ethanol, other end-products may be obtained and these include without limitation, glycerol, ASA intermediates, 1,3-propanediol, butanol, isobutanol, acetic acid, lactic acid, oil, enzymes, antimicrobials, organic acids, amino acids and antibiotics.

[0188] In some embodiments, the yield of ethanol will be greater than 0.1%, 0.2%, 0.3%, 0.4%, 0.5%, 0.6%, 0.7%, 0.8%, 0.9%, 1%, 2%, 3%, 4%, 5%, 6%, 7%, 8%, 10%, 12%, 14%, 16%, 18% and 20% by volume. In other embodiments, at least 50%, 60%, 70%, 80% of the final ethanol yield is produced in the first 20, 22, 24, 26, 28 or 30 hours. In certain embodiments, the yield of ethanol will be greater than 3% and at least 5% of the final ethanol will be produced in the first 5 days. The ethanol obtained according to the fermentation process may be used as a fuel ethanol, potable ethanol or industrial ethanol.

[0189] The mash at the end of the fermentation may include from 0 to 30% residual cellulose or lignocellulose. In some embodiments, the mash may include at least 1%, 2%, 4%, 6%, 8%, 10%, 12% but less than 30%, less than 20% and less than 15% residual cellulose or lignocellulose.

[0190] The term “fermenting microorganism” refers to any microorganism suitable for use in a desired fermentation process. Suitable fermenting microorganisms according to the invention are able to ferment, i.e., convert, sugars, such as glucose, xylose, arabinose, mannose, galactose, or oligosaccharides, directly or indirectly into the desired fermentation product(s). Examples of fermenting microorganisms include fungal organisms, such as yeast. Preferred yeast includes strains of Saccharomyces spp., and in particular, Saccharomyces cerevisiae. Commercially available yeast include, e.g., Red Star®/Lesaffre Ethanol Red, FALI, SUPERSTART, GERT, and FERMIOL. Other microorganisms may also be used depending the fermentation product(s) desired. These other microorganisms include Gram positive bacteria, e.g., Lactobacillus such as Lactobacillus lactis, Propionibacterium such as Propionibacterium freudenreichii; Clostridium sp. such as Clostridium butyricum, Clostridium beijerinckii, Clostridium diolis, Clostridium acetobutylicum, and Clostridium thermocellum; Gram negative bacteria, e.g., Zymomonas such as Zymomonas mobilis; and filamentous fungi, e.g., Rhizopus oryzae. Bacteria that can efficiently ferment glucose to ethanol include, for example, Zymomonas mobilis.

[0191] According to preferred embodiments, the yeast is a Saccharomyces sp., Saccharomyces cerevisiae, Saccharomyces distaticus, Saccharomyces uvarum, Kluyveromyces, Kluyveromyces marxianus, Kluyveromyces fragilis, Candida, Candida pseudotropicalis, Candida brassicae, Clavispora, Clavispora lusitaniae, Clavispora opuntiae, Pachysolen, Pachysolen tannophilus, Bretannomyces, Bretannomyces clauseni.

[0192] It is well known in the art that the organisms described above can also be used to produce other organic substances, as described herein. Other examples might be clostridial strains for butanol or isobutanol production, algae for oil production, various bacteria for acetic acid production. According to some embodiments, the algae are used for the production of oils, which may then be used as a source to produce non-petroleum-based diesel fuel (e.g., biodiesel). Preferably, the alga is selected from spirogyra, cladophora, oedogonium, or a combination thereof. The production of biodiesel may be performed using any known method in the art. According to preferred embodiments, the saccharifying enzymes are inactivated using a heat and/or chemical process prior to the addition of algae.

[0193] A fermentation stimulator may also be used to improve the fermentation process, and in particular, the performance of the fermenting microorganism, such as, rate enhancement and ethanol yield. A “fermentation stimulator” refers to stimulators for growth of the fermenting microorganisms, in particular, yeast. Preferred fermentation stimulators for growth include vitamins and minerals. Examples of vitamins include multivitamins, biotin, pantothenate, nicotinic acid, meso-inositol, thiamine, pyridoxine, para-aminobenzoic acid, folic acid, riboflavin, and Vitamins A, B, C, D, and E. Examples of minerals include minerals and mineral salts that can supply nutrients comprising P, K, Mg, S, Ca, Fe, Zn, Mn, and Cu.

### DEFINITIONS

[0194] As used herein, the terms “transformed”, “stably transformed” or “transgenic” with reference to a cell means the cell has a non-native (heterologous) nucleic acid sequence integrated into its genome or as an episomal plasmid that is maintained through multiple generations.

[0195] As used herein, the term “expression” refers to the process by which a polypeptide is produced based on the nucleic acid sequence of a gene. The process includes both transcription and translation.

[0196] The term “introduced” in the context of inserting a nucleic acid sequence into a cell, means “transfection”, or “transformation” or “transduction” and includes reference to the incorporation of a nucleic acid sequence into a eukaryotic or prokaryotic cell where the nucleic acid sequence may be incorporated into the genome of the cell (for example, chromosome, plasmid, plastid, or mitochondrial DNA), converted into an autonomous replicon, or transiently expressed (for example, transfected mRNA).

[0197] By the term “host-cell” is meant a cell that contains a vector and supports the replication, and/or transcription or transcription and translation (expression) of the expression construct. Host cells for use in the present invention can be prokaryotic cells, such as E. coli, or eukaryotic cells such as yeast, plant, insect, amphibian, or mammalian cells. In general, host cells are S. degradans or other marine γ-proteobacterium.

[0198] The term “cellulase” refers to a category of enzymes capable of hydrolyzing cellulose polymers to shorter cello-oligosaccharide oligomers, cellobiose and/or glucose. Numerous examples of cellulases, such as exoglucanases, exocellobiohydrolases, endoglucanases, and glucosidases have been obtained from cellulolytic organisms, particularly including fungi, plants and bacteria.

[0199] The term “endoglucanase” is defined herein as an endo-1,4-(1,3; 1,4)-β-D-glucan 4-glucanohydrolase, which catalyses endohydrolysis of 1,4-β-D-glycosidic linkages in cellulose, cellulose derivatives (such as carboxymethyl cellulose and hydroxyethyl cellulose), lichenin, β-1,4 bonds in mixed β-1,3 glucans such as cereal β-D-glucans or xyloglucans, and other plant material containing cellulosic components. Endoglucanases digest the cellulose polymer at random locations, opening it to attack by cellobiohydrolases.

[0200] The exo-1,4-β-D-glucanases include both cellobiohydrolases and glucohydrolases.

[0201] The term “cellobiohydrolase” is defined herein as a 1,4-β-D-glucan cellobiohydrolase, which catalyzes the hydrolysis of 1,4-β-D-glucosidic linkages in cellulose, cellooligosaccharides, or any β-1,4-linked glucose containing polymer, releasing cellobiose from the reducing or non-reducing ends of the chain. Cellobiohydrolases sequentially release molecules of cellobiose from the ends of the cellulose polymer.

[0202] The term “glucohydrolase” is defined herein as a 1,4-β-D-glucan glucohydrolase, which catalyzes the hydrolysis of 1,4-linkages (O-glycosyl bonds) in 1,4-β-D-glucans so as to remove successive glucose units. Glucohydrolases liberate molecules of glucose from the ends of the cellulose polymer.

[0203] The term “β-glucosidase” is defined herein as a β-D-glucoside glucohydrolase, which catalyzes the hydrolysis of terminal non-reducing β-D-glucose residues with the release of β-D-glucose. Cellobiose is a water-soluble β-1,4-linked dimer of glucose. β-glucosidases hydrolyze cellobiose to glucose.

[0204] Analysis of zymograms and proteomic analyses of cultures may be used to reveal the identity of enzymes that are induced during growth on a particular substrate (e.g., glucose, Avicel™, oat spelt xylan, newsprint, whole and pulverized corn leaves, pulverized Panicum vigatum leaves, or any other known substrate). Induction of specific enzymes can be assessed by qRT-PCR. Nomenclature for specific enzymes is explained in further detail in U.S. application Ser. No. 11/121,154, filed on May 4, 2005 and published as U.S. Publication No. 2006/0105914, which is incorporated herein in its entirety.

[0205] The term “fermentation medium” will be understood to refer to a medium before the fermenting microorganism(s) is(are) added, such as, a medium resulting from a saccharification process, as well as a medium used in a simultaneous saccharification and fermentation process (SSF).

[0206] A “fermentable sugar” refers to mono- or disaccharides, which may be converted in a fermentation process by a microorganism in contact with the fermentable sugar to produce an end product. In some embodiments, the fermentable sugar is metabolized by the microorganism and in other embodiments the expression and/or secretion of enzymes by the microorganism achieves the desired conversion of the fermentable sugar.

[0207] As used herein, “monosaccharide” refers to a monomeric unit of a polymer such as starch wherein the degree of polymerization is 1 (e.g., glucose, mannose, fructose and galactose).

[0208] As used herein the term “starch” refers to any material comprised of the complex polysaccharide carbohydrates of plants, comprised of amylose and amylopectin with the formula (C₆H₁₀O₅)ₓ, wherein x can be any number.

[0209] The term “cellulose” refers to any cellulose-containing material. In particular, the term refers to the polymer of glucose (cellobiose) with the formula (C₆₁H₁₀O₅)ₓ, wherein x can be any number.

[0210] The term “slurry” refers to an aqueous mixture containing insoluble solids (may be used interchangeably with “pulp”).

[0211] The term “mash” refers to a mixture of a fermentable substrate in liquid used in the production of a fermented product and is used to refer to any stage of the fermentation from the initial mixing of the fermentable substrate or inoculated pulp and fermenting organisms through the completion of the fermentation run. Sometimes the terms “mash”, “fermentation broth”, and “fermentation medium” are used interchangeably. In some embodiments the term fermentation broth means a fermentation medium, which includes the fermenting organisms.

[0212] The terms “saccharifying enzyme” and “starch hydrolyzing enzymes” refer to any enzyme that is capable of converting starch to mono- or oligosaccharides.

[0213] The term “vessel” includes but is not limited to tanks, vats, bottles, flasks, bags, bioreactors and the like. In one embodiment, the term refers to any receptacle suitable for conducting the saccharification and/or fermentation processes encompassed by the invention.

[0214] “A”, “an” and “the” include plural references unless the context clearly dictates otherwise.

[0215] Numeric ranges are inclusive of the numbers defining the range.

[0216] The term “variant” refers to a protein or polypeptide in which one or more amino acid substitutions, deletions, and/or insertions are present as compared to the amino acid sequence of an protein or peptide and includes naturally occurring allelic variants or alternative splice variants of an protein or peptide. The term “variant” includes the replacement of one or more amino acids in a peptide sequence with a similar or homologous amino acid(s) or a dissimilar amino acid(s). There are many scales on which amino acids can be ranked as similar or homologous. (Gunnar von Heijne, Sequence Analysis in Molecular Biology, p. 123-39 (Academic Press, New York, N.Y. 1987.) Preferred variants include alanine substitutions at one or more of amino acid positions. Other preferred substitutions include conservative substitutions that have little or no effect on the overall net charge, polarity, or hydrophobicity of the protein. Conservative substitutions are set forth in the table below. According to some embodiments, the SPINT1 and TMPRSS4 polypeptides have at least 80%, 85%, 88%, 95%, 96%, 97%, 98% or 99% sequence identity with the amino acid sequences of the preferred embodiments.)

### Conservative Amino Acid Substitutions

| | |
|---|---|
| Basic: | arginine |
| | lysine |
| | histidine |
| Acidic: | glutamic acid |
| | aspartic acid |
| Uncharged Polar: | glutamine |
| | asparagine |
| | serine |
| | threonine |
| | tyrosine |
| Non-Polar: | phenylalanine |
| | tryptophan |
| | cysteine |
| | glycine |
| | alanine |
| | valine |
| | praline |
| | methionine |
| | leucine |
| | isoleucine |

[0218] The table below sets out another scheme of amino acid substitution:

| Original Residue | Substitutions |
|---|---|
| Ala | Gly; Ser |
| Arg | Lys |
| Asn | Gln; His |
| Asp | Glu |
| Cys | Ser |
| Gln | Asn |
| Glu | Asp |
| Gly | Ala; Pro |
| His | Asn; Gln |
| Ile | Leu; Val |
| Leu | Ile; Val |
| Lys | Arg; Gln; Glu |
| Met | Leu; Tyr; Ile |
| Phe | Met; Leu; Tyr |
| Ser | Thr |
| Thr | Ser |
| Trp | Tyr |
| Tyr | Trp; Phe |
| Val | Ile; Leu |

[0219] Other variants can consist of less conservative amino acid substitutions, such as selecting residues that differ more significantly in their effect on maintaining (a) the structure of the polypeptide backbone in the area of the substitution, for example, as a sheet or helical conformation, (b) the charge or hydrophobicity of the molecule at the target site, or (c) the bulk of the side chain. The substitutions that in general are expected to have a more significant effect on function are those in which (a) glycine and/or proline is substituted by another amino acid or is deleted or inserted; (b) a hydrophilic residue, e.g., seryl or threonyl, is substituted for (or by) a hydrophobic residue, e.g., leucyl, isoleucyl, phenylalanyl, valyl, or alanyl; (c) a cysteine residue is substituted for (or by) any other residue; (d) a residue having an electropositive side chain, e.g., lysyl, arginyl, or histidyl, is substituted for (or by) a residue having an electronegative charge, e.g., glutamyl or aspartyl; or (e) a residue having a bulky side chain, e.g., phenylalanine, is substituted for (or by) one not having such a side chain, e.g., glycine. Other variants include those designed to either generate a novel glycosylation and/or phosphorylation site(s), or those designed to delete an existing glycosylation and/or phosphorylation site(s). Variants include at least one amino acid substitution at a glycosylation site, a proteolytic cleavage site and/or a cysteine residue. Variants also include proteins and peptides with additional amino acid residues before or after the protein or peptide amino acid sequence on linker peptides. The term “variant” also encompasses polypeptides that have the amino acid sequence of the proteins/peptides of the present invention with at least one and up to 25 (e.g., 5, 10, 15, 20) or more (e.g., 30, 40, 50, 100) additional amino acids flanking either the 3′ or 5′ end of the amino acid sequence.

[0220] The headings provided herein are not limitations of the various aspects or embodiments of the invention, which can be had by reference to the specification as a whole.

[0221] The following examples are illustrative, but not limiting, of the methods and compositions of the present invention. Other suitable modifications and adaptations of the variety of conditions and parameters normally encountered in therapy and that are obvious to those skilled in the art are within the spirit and scope of the embodiments.

### EXAMPLES

[0222] The following examples further support, but do not exclusively represent, preferred embodiments of the present invention.

### Example 1

### Genotyping Methods

[0223] The growth rate of S. degradans was measured when it was cultured on different substrates. The basic media was composed of (2.3% Instant Ocean, 0.05% Yeast Extract, 0.05% NH₄Cl, 15 mM Tris, pH 6.8). The final concentration of each carbon source were 0.2% for Glucose, Xylose, Cellobiose, Arabinose, Xylan, Avicel™ and 1.0% for Newsprint, Switchgrass, and corn leaves. S. degradans grew on all plant material it was grown on.

[0224] A Zymogram was performed to find which glucanases were induced during growth on various cell wall polymers (FIG. 2). Cells were grown to an OD₆₀₀ of 0.3-0.5 in media containing glucose as the sole carbon source, harvested and transferred to the same volume of media containing the indicated inducer. Samples were removed at the indicated times and proteins in samples normalized to OD₆₀₀ were fractionated by standard SDS-PAGE in which either 0.1% barley β-glucan or HE cellulose was included in the resolving gel. Gels were incubated in refolding buffer (20 mM PIPES [piperazine-N,N′-bis(2-ethanesulfonic acid)] buffer [pH 6.8], 2.5% Triton X-100, 2 mM dithiothreitol, 2.5 mM CaCl₂) for 1 h at room temperature and then held overnight in fresh refolding buffer at 4° C. The gels were transferred to PIPES buffer, incubated at 37° C., and stained in 0.25% Congo red. Calculated masses are shown on the left in kDa. Different glucanases were expressed in the presence of different plant materials or carbohydrate sources used.

[0225] The expression of cellulolytic enzymes during growth on glucose and cell wall polymers was determined (FIG. 3). S. degradans was cultured on glucose to OD₆₀₀ 0.3-0.4, harvested and transferred to the same volume medium containing the indicated substrate. After 10 hours the RNA was isolated using the RNA PROTECT™ Bacteria Reagent (Qiagen) and RNEASY™ Mini kit (Qiagen). The cDNA was synthesized using the QIANTITECT™ Reverse Transcription Kit. The 120-200 bp fragments of each indicated gene or two control genes for Guanylate kinase and Dihydrofolate reductase were amplified using the SYBR Green™ master mix kit (Roche) and a LIGHT CYCLE® 480 (Roche). The bars shown with numbers above them are presented at 1/10 scale. Different celluloytic enzymes were induced by different plant materials or carbohydrate sources.

### Example 2

### Measurement of Increase in Expression of Xyn10A, Xyn10B, Xyn11A and Xyn11B in Response to Growth of S. Degradans on Xylan

[0226] Primers were designed for six target genes: xyn10A-D and xyn11A-B along with two house keeping genes: dihydrofolate reductase and guanylate kinase. S. degradans was cultured in glucose media until OD₆₀₀ reached 0.370-0.400. The 0 hour time point was taken and the cultures were transferred to xylan media for 10 hour time course experiments. A second culture was transferred back to glucose as a control. Samples were taken at 0, 2, 4 and 10 hours from both the xylan and glucose cultures.

[0227] RNA from each sample was purified using RNAprotect™ bacteria reagent (Qiagen) and Rneasy MiniKit. The isolated mRNA was transformed using QuantiTech™ reverse transcriptase and expression patterns were analyzed using LightCycler Pro™ pRT-PCR.

[0228] As shown in FIG. 6, xyn10A, xyn10B, xyn10D, xyn11A and xyn11B all had greater mRNA expression at 2, 4, and 10 hours after exposure to xylan. The increases were the greatest for xyn10A, xyn10B, xyn11A and xyn11B. As shown in FIG. 7, the highest fold induction of mRNA expression at 2 hours of culture of S. degradans on xylan, was for xyn11A and xyn11B. Xyn10A had the highest induction at 4 hours. At 10 hours, xyn10A, xyn10B, xyn11A and xyn11B all had higher fold induction.

[0229] As S. degradans increases expression of these proteins when it is exposed to xylan, and with the sequence homology these proteins have to known hemicellulase genes, Xyn10A, Xyn10B, Xyn10D, Xyn11A and Xyn11B are functional hemicellulases that can be used to break down hemicellulose.

### Example 3

### Secreted Enzymes of S. Degradans Produce Cellobiose

[0230] The cellulolytic system of S. degradans is capable of utilizing pure cellulose for its growth and metabolism. To determine the initial products of cellulose degradation, the secreted enzymes of S. degradans were allowed to degrade cellulose and the products of the reaction monitored by thin-layer chromatography (FIG. 17). Irrespective of the cellulosic substrate or reaction time, cellobiose was the primary product. This opened the possibility that one or more of the GH5 enzymes could generate cellobiose and/or cellotriose.

### Example 4

### Activity of GH5 Glucanases of S. Degradans

[0231] To understand the mechanism for degradation of cellulose, the biochemical activity for each of the GH5 cellulases predicted for the S. degradans cellulolytic system was evaluated. Three of the originally annotated endoglucanases, Cel5H, Cel5G and Cel5J were shown to be processive. This is a new activity for this family of enzymes and suggests that this bacterium utilizes a novel mechanism to degrade cellulose. In this mechanism, these highly expressed and active processive GH5 endoglucanases degrade cellulose to cellobiose. The cellobiose is then converted to glucose by the activity of β-glucosidases or cellobiose phosphorylase.

[0232] In order to test the proposed biochemical activities of the annotated GH5 glucanases, genes for each of the annotated GH5 glucanases were amplified from the S. degradans 2-40 genome by PCR and cloned into the T7 expression system carried by pET28b (Table S2). After transformation into E. coli Rosetta2™ (DE3), expression of the cloned genes was induced by IPTG (Isopropyl β-D-1-thiogalactopyranoside) and enzyme activity in cell lysates assessed using β-glucan and HE (hydroxyethyl) cellulose zymograms. Most of the expressed GH5 glucanases exhibited endoglucanase activity in β-glucan and HE cellulose zymograms consistent with their annotation as cellulases (FIG. 12). Endoglucanase activity was detected in each case as zones of clearing in Congo Red-stained gels. Cel5B, Cel5C, Cel5E, Cel5F, and Cel5H were comparatively stable. In contrast, Cel5A, Cel5D, Cel5G, Cel5I, and Cel5J were unstable. Residual full length polypeptides as well as the fragments of Cel5A, Cel5G and Cel5J sufficient to carry the catalytic domain retained cellulase activity. None of the fragments derived from Cel5C or Cel5I exhibited evidence of cellulase activity on any substrate. Use of protease inhibitors, alternative protease-deficient host strains, a variety of cell lysis protocols and alternative cloning strategies did not improve the stability of any of these modular enzymes.

TABLE S2
Primers used in this study

| | Restric- | |
|---|---|---|
| | tion | |
| Primer | site | Nucleotide sequence |
| Cel5A-F | BamHI | CCCGGATCCCATGCAAAGCACTGCAGCGGTA |
| Cel5A-R | EcoRI | CCGAATTCCACGGTGCTTGTGCTGCGTATTC |
| Cel5B-F | BamHI | CCCGGATCCTGGTGGCGATGCTTTAGCGTGC |
| Cel5B-R | EcoRI | CCGAATTCATCGGGTTTGGCGCCACTAATAC |
| Cel5C-F | BamH I | CCCGGATCCCGAAGCGCTTTACCCAAGCTAC |
| Cel5C-R | EcoR I | CCGAATTCCCTTCCATAATGGCATCTAG |
| Cel5D-F | BamH I | CCCGGATCCATCAAGCTCTAGTTCGTCGTCT |
| Cel5D-R | EcoR I | CCGAATTCCCGGCATTGATAATTGCGTT |
| Cel5E-F | BamHI | GCGAATTCAACGCGGTATTTCTAGGTCC |
| Cel5E-R | HindIII | CGCAAGCTTCGTCCAAATAGGTACTTGGTTCTAGC |
| Cel5F-F | BamHI | CCCGGATCCTGCAAATAACAGCGCCCCATCA |
| Cel5F-R | EcoRI | CCGAATTCCCAGCTTCTAGCATAACCTGTTT |
| Cel5G-F | BamHI | CCCGGATCCCGTAGCGCCGTTAACCGTAGAT |
| Cel5G-R | EcoRI | CCGAATTCGATGAGCTTGAGGAGGAACT |
| Cel5H-F | BamHI | CCCGGATCCAATTCTTAGCGGTGGCCAGCAA |
| Cel5H-R | XhoI | CCCGCTCGAGCCAGCTACCAAATTGCAGGGTGT |
| Cel5I-F | BamH I | CCGGATCCTGGTGGTGGAGTATTCCGCGTA |
| Cel5I-R | Eco R I | CCGAATTCCGAGAATCGAAGTCTAACCAAC |
| Cel5J-F | BamHI | CCCGGATCCCGTGCCAGCAATGTCCGTACAA |
| Cel5J-R | EcoRI | CCGAATTCCCGAAGCCACCACTAGTAATACC |

[0233] Significant differences were noted, however, in the apparent activity of these cellulases. Although each polypeptide appeared to be expressed at similar levels from the pET28b expression system in Rosetta2™ (DE3) transformants, some lysates had to be diluted significantly in order to see discrete regions of activity in zymograms. The highest activity seemed to be associated with Cel5G, Cel5H and Cel5J. Cell lystates of Rosetta2™ (DE3) transformants expressing these enzymes had to be diluted at least 10⁵ before a well-defined zone of activity typical of an individual polypeptide could be identified (FIG. 12).

### Example 5

### Purification and Properties of Cel5H

[0234] Because the apparent specific activity of Cel5H seemed to be at least 100-fold higher than the other cellulases and the polypeptide appeared to be stable in lysates, it was chosen for further analysis. To determine the biochemical properties of Cel5H, the polypeptide was purified to near homogeneity from Rosetta2™ (DE3) transformants by nickel-NTA (nitriltriacetic acid) chromatography employing the 6×-His tags created when the gene was cloned into pET28b. In order to establish the appropriate assay conditions, optimal temperature, pH and ionic conditions were determined. Cel5H exhibited a pH optimum of 6.5 and retained greater than 84% of its activity in the range between pH 6.0-7.0. Activity increased linearly up to 50° C. but lost activity at higher temperatures. Addition of salt enhanced the activity of the enzyme. A 2.5 fold increase in activity was observed when 1% Instant Ocean™ was included in the assay mixture. This effect was complex as 1% NaCl only partially substituted for Instant Ocean (1.9-fold stimulation) and the metal salts included in Instant Ocean were not stimulatory individually or in combination with 1.0% NaCl. The specific activity of purified Cel5H was established on soluble carboxymethyl cellulose (CMC) as well as substrates of increasing crystallinity (Table S1). The activity was highest on CMC but significant activity was retained on filter paper and Avicel™.

TABLE S1
Specific Activity of S. degradans Cel5H on Cellulosic Substrates

| | Specific activity on the indicated substrate | | | |
|---|---|---|---|---|
| | (μmol reducing sugar × minute⁻¹ × μmol cellulase^{-1a,b}) | | | |
| Cellulase | | Swollen | | |
| (kDa)^{c} | CMC^{d} | Cellulose^{d} | Filter Paper^{d} | Avicel ™^{d} |
| Cel5H (72) | 643 ± 23% | 792 ± 15% | 2.21 ± 5% | 1.45 ± 10% |
| Cel5H′ (35) | 500 ± 2% | 545 ± 15% | 0.92 ± 11% | 0.66 ± 11% |

^{a}Reducing sugar released from CMC and swollen cellulose was measured using a DNS assay relative to a cellobiose standard curve whereas glucose released from filter paper and Avicel ™ was measured using the glucose oxidase method.
^{b}milligrams of protein measured using BSA as the reference
^{c}The size of the largest polypeptide in a barley-β-glucan zymogram (kDa)
^{d}The approximate degree of crystallinity for each substrate (% crystallinity, 14): carboxymethyl cellulose CMC (soluble), PASC (10-20%), filter paper (50%), and Avicel ™ *(70%).

[0235] Product Analysis: The products released by Cel5H were determined using thin layer chromatography (TLC). Cellobiose was the primary product formed during digestion of swollen cellulose, filter paper, and Avicel™ (FIG. 13). Because the apparent accumulation of cellobiose could be due to the length of the digestion, shorter digestions were performed. Even at 45 seconds cellobiose was the primary product detected. In no case could products larger than cellotriose be detected.

[0236] Cel5H is Processive: The accumulation of cellobiose as the primary reaction product could be an indication of processivity. To evaluate the processivity of Cel5H, the ratio of soluble and insoluble products was measured and compared to that of T. fusca Cel9A (processive endoglucanase) and T. fusca Cel6A (classical endoglucanase) (gifts of D. Wilson, 7). Like the processive T. fusca Cel9A and in contrast to the classical endoglucanase T. fusca Cel6A (11), 82% of the products formed by the activity of the S. degradans Cel5H were soluble (Table S4). For both T. fusca Cel9A and S. degradans Cel5H the ratio of soluble products to insoluble products was excess of 4.

[0237] An additional experiment was performed to verify the processivity of Cel5H. Both soluble and insoluble ends were measured during a 2 hr time course (FIG. 14). The rates of soluble and insoluble product formation were divergent. Soluble sugar was released at a rate greater than 4 times faster than insoluble ends consistent with the data of Table S4.

TABLE S4
Processivity of S. degradans Cel5H

| | | | Soluble | Insoluble |
|---|---|---|---|---|
| | Specific | Processive | Reducing | Reducing |
| Cellulase^{a} | Activity^{b} | Ratio^{c} | Sugar^{d} | Sugar^{d} |
| T. fusca Cel9A | 0.70 ± 0.014 | 4.72 ± 0.43 | 82.5% | 17.5% |
| (Proc. Endo) | | | | |
| T. fusca Cel6A | 1.33 ± 0.14 | 2.55 ± 0.28 | 71.9% | 28.1% |
| (Endo) | | | | |
| S. degradans | 1.66 ± 0.07 | 4.26 ± 0.71 | 81.4% | 18.6% |
| Cel5H | | | | |
| S. degradans | 0.92 ± 0.01 | 4.42 ± 1.07 | 81.1% | 18.9% |
| Cel5H′ | | | | |

^{a}0.1 nmol of each cellulase was used in each 2 h digestion of filter paper.
^{b}The specific activity is reported as μmol reducing sugar × minute⁻¹ × μmol cellulase⁻¹.
^{c}The processive ratio is defined as the μmol soluble reducing sugar (cellobiose standard) divided by μmol insoluble sugar (glucose standard).
^{d}The mass fractions of soluble and insoluble products given as percentages.

[0238] Cel5H acts from the nonreducing end of cellulose: The processivity of Cel5H opens the possibility that there is directionality to its activity similar to cellobiohydrolases specific to either the nonreducing or reducing end of the cellulose polymer. To determine whether Cel5H acts from the non-reducing or reducing end, degradation of para-nitrophenol-cellobioside (pNP-cellobioside) was monitored. The activity of Cel5H released pNP and cellobiose from the substrate. As the pNP group was located at the reducing end of the cellobiose unit in the substrate, these results indicate that Cel5H acts from the non-reducing end of the polymer to release cellobiose.

### Example 6

### Role of CBM6 in the Activity and Processivity of Cel5H

[0239] To determine the contribution of the resident CBM6 of Cel5H to its activity and processivity, the activity of the full length polypeptide was compared to that of its truncated derivative consisting of the GH5 catalytic domain constructed by specific amplification of the catalytic domain (Cel5H′). The specific activity of Cel5H′ was 69% that of Cel5H on amorphous PASC and 78% on soluble CMC. On the crystalline substrates, 42% of the activity was retained on filter paper and 46% on Avicel™ (Table S1). The ratio of soluble to insoluble products, however, remained constant and was indistinguishable from that of Cel5H. Thus, processivity of the enzyme resides with the catalytic domain.

### Example 7

### Cel5H is an Endoglucanase

[0240] The observation of processivity was surprising for this GH5 family enzyme as the activity of the enzymes carrying this domain have previously been classified as endoglucanases (Lo Leggio, L. and Larsen, S. (2002) The 1.62 angstrom structure of Thermoascus aurantiacus endoglucanase: completing the structural picture of subfamilies in glycoside hydrolase family 5. FEBS Lett 523:103-108). To evaluate whether Cel5H is an endoglucanase, its effect on the viscosity of CMC solutions was monitored. When a soluble polymer such as CMC is cleaved randomly, the degree of polymerization dramatically decreases and viscosity is reduced whereas exo-acting enzymes have little effect on viscosity. (Wilson, D. B. (2004) Chem Rec 4:72-82). The exo-acting cellulase, T. fusca Cel6B, had no significant effect on the viscosity of CMC as expected (FIG. 15). In contrast, S. degradans Cel5H rapidly decreased the viscosity of CMC similar to the endoglucanase T. fusca Cel9B, thus supporting the prediction that Cel5H is an endoglucanase.

[0241] Synergistic interactions between cellulases also provide an indication of the activity of the enzymes. Endo-acting cellulases act synergistically with exo-acting enzymes by increasing the availability of reducing ends on the substrate for the exo-acting enzyme. (Jeoh et al. (2006) Effect of cellulase mole fraction and cellulose recalcitrance on synergism in cellulose hydrolysis and binding. Biotechnol Progr 22:270-277). S. degradans Cel5H acted synergistically with the exoglucanase T. fusca Cel6B, producing at least 30% more product when acting together than each individually (Table S3). In contrast anti-synergism was observed with the endoglucanase Cel9B with combined activities 15-25% lower than theoretical as seen previously in the interaction of classical endoglucanases. (Jeoh et al. (2006) Effect of cellulase mole fraction and cellulose recalcitrance on synergism in cellulose hydrolysis and binding. Biotechnol Progr 22:270-277). These are consistent with the identification of Cel5H as a processive endoglucanase.

TABLE S3
Synergy of S. degradans and T. fusca cellulases

| | | Yield of Glucose (μg) | | | |
|---|---|---|---|---|---|
| | Nanomoles | Independent | Theoretical | Actual | |
| Cellulase^{a} | Cellulase | Yield^{b} | Yield^{c} | Yield | DoS^{d} |
| S. degradans Cel5H | 1 | 12.6 ± 0.90 | | | |
| T. fusca Cel9B | 0.1 | 5.91 ± 0.49 | 18.5 | 14.3 ± 0.44 | 0.77 |
| T. fusca Cel6B | 0.1 | 2.65 ± 0.02 | 15.3 | 20.1 ± 0.89 | 1.31 |
| S. degradans Cel5G | 1 | 10.5 ± 1.32 | | | |
| T. fusca Cel9B | 0.1 | 5.91 ± 0.49 | 16.4 | 14.1^{e} | 0.86 |
| T. fusca Cel6B | 0.1 | 2.65 ± 0.02 | 13.2 | 20.4 ± 0.95 | 1.55 |

^{a}T. fusca Cel9B (Endoglucanase) and T. fusca Cel6B (Exoglucanase)
^{b}The independent yield was measured after two hours as described for the filter paper assay
^{c}The sum of the μg glucose produced for both the S. degradans and the T. fusca cellulases
^{d}DoS: The degree of synergy: the actual yield divided by the theoretical yield
^{e}Representative of single trial due to lack of T. fusca cellulase

### Example 8

### Cel5H Acts on Amorphous Cellulose

[0242] The comparative high activity of Cel5H on crystalline substrates, such as Avicel™, suggested that this enzyme may be acting on crystalline cellulose like many well known cellobiohydrolases. To investigate this hypothesis, an extended degradation was performed using highly crystalline hydrolyzed cotton linters (>90% crystalline) as the substrate. (Zhang et al. (2006) Outlook for cellulase improvement: Screening and selection strategies. Biotechnol Adv 24:452-481). After 150 hours only 0.1% percent of the hydrolyzed cotton linters were converted to cellobiose (FIG. 18). The preparation, however, retained similar levels of activity on CMC through the course of the experiment. Similar levels of digestion were obtained with Cel5H. In contrast, a commercial preparation derived from H. jecorina known to degrade crystalline cellulose (Accelerase 1000; Genencor) degraded greater than 7% of the substrate in 24 hours. These observations are most consistent with a substrate bias of Cel5H towards the amorphous regions of cellulose consistent with the presence of a CBM6.

### Example 9

### Phylogenetic Analysis of the S. Degradans GH5 Domains

[0243] To understand the relationships between Cel5H and the other GH5 endoglucanases of S. degradans, phylogenetic relationships were determined by nearest neighbor joining. Significant differences were apparent in the organization of the structural features of S. degradans GH5 endoglucanases that precluded the use of full length polypeptides in the phylogenetic analyses. Instead, the GH5 domain of each cellulase together with that of its closest homolog in the NR database was used in the analyses. Two distinct clades of GH5 endoglucanases were apparent (FIG. 16). The majority of the endoglucanases carry a GH5 domain near the carboxy terminus of the host polypeptide and segregate into a single clade with strong bootstrap support. The first clade included Cel5A_{N}, Cel5B, Cel5C, Cel5D, Cel5E, CelF, and Cel5I as well as their homologs. The second clade comprised Cel5A_{C}, Cel5G, Cel5H, and Cel5J. Most of the enzymes associated with the second clade carry a GH5 near the amino terminus of the polypeptide and a CBM6 near the carboxy terminus. Of particular interest were Cel5G and Cel5H. Both enzymes exhibited strong similarities in sequence and domain organization, including the 7 conserved catalytic residues of the GH5 catalytic domain, differing only in the length and sequence of the linker region. No full length homologs to Cel5G/Cel5H were detected in the databases. The distinct domain organization and the phylogenetic segregation into a separate clade opened the possibility that the enzymes of the second clade represent a distinct subclass of GH5 endoglucanases.

### Example 10

### Purification and Properties of Other GH5 Endoglucanases

[0244] To determine the biochemical properties of the remaining GH5-containing cellulases, each polypeptide was purified to near homogeneity from Rosetta2™ (DE3) transformants as before either as the full length polypeptide (Cel5B, Cel5E, Cel5F) or the active catalytic domain (Cel5D′, Cel5G′, Cel5J′). The activity of purified Cel5B, ‘Cel5D, Cel5E and Cel5F were typical of classical endoglucanases. The enzymes had pH optima near 6.5, did not require salts and functioned up to 50° C. (Table S5).

TABLE S5
pH optimum

| Cellulase | MES pH = 5.0 | PIPES pH = 6.5 | TRIS pH = 8.0 |
|---|---|---|---|
| Cel5B | 100% | 92% | 95% |
| Cel5F | 54% | 100% | 63% |
| Cel5D | N/T | 100% | 84% |
| Cel5G | 76% | 100% | 71% |
| Cel5H^{a} | 21% | 100% | 23% |

^{a}Cel5H contained 0.04% Urea

[0245] In contrast to fungal cellulases (Kumar et al. (2008) Bioconversion of lignocellulosic biomass: biochemical and molecular perspectives. J Ind Microbiol Biot 35:377-391), Cel5B, Cel5D, Cell5E, Cel5F, and Cel5G retained at least 60% of the optimal activity at pH 8.0. As before, the activity was inversely proportional to the crystallinity of the cellulose substrate with the highest activity observed on CMC (Table 3).

TABLE 3
Specific Activities of the S. degradans GH5 cellulases

| | Specific activity on the indicated substrate^{a,b} | | | |
|---|---|---|---|---|
| | (μmol reducing sugar × minute⁻¹ × mg protein⁻¹) | | | |
| Cellulase^{c} | | Swollen | | |
| (kDa) | CMC^{d} | Cellulose | Filter Paper^{d} | Avicel ™^{d} |
| Cel5B (62) | 2.23 ± 16% | 1.53 × 10⁻² ± 4% | 1.84 × 10⁻³ ± 4% | 1.44 × 10⁻³ ± 8% |
| Cel5D (40) | 8.59 × 10⁻⁴ ± 26% | 1.13 × 10⁻⁴ ± 5% | 2.68 × 10⁻⁵ ± 28% | N/D^{e} |
| Cel5E (40) | 4.82 × 10⁻² ± 43% | 5.96 × 10⁻³ ± 8% | 4.01 × 10⁻⁶ ± 19% | N/D^{e} |
| Cel5F (42) | 0.37 ± 21% | 4.27 × 10⁻² ± 4% | 6.60 × 10⁻⁴ ± 7% | 6.26 × 10⁻⁴ ± 12% |
| Cel5G (42) | 4.62 ± 13% | 5.65 × 10⁻² ± 2% | 5.12 × 10⁻³ ± 4% | 4.88 × 10⁻³ ± 9% |
| Cel5H (72) | 9.61 ± 23% | 7.80 × 10⁻² ± 8% | 3.29 × 10⁻² ± 5% | 2.18 × 10⁻² ± 7% |
| Cel5J (38) | 6.97 ± 8% | 4.86 × 10⁻² ± 2% | 6.67 × 10⁻³ ± 6% | 2.18 × 10⁻³ ± 2% |

^{a}Reducing sugar released from CMC and swollen cellulose was measured using a DNS assay relative to a cellobiose standard curve whereas glucose released from filter paper and Avicel ™ was measured using the glucose oxidase method
^{b}milligrams of protein measured using BSA as the reference
^{c}The size of the largest polypeptide in a barley-β-glucan zymogram (kDa)
^{d}The approximate degree of crystallinity for each substrate (% crystallinity, 14): Carboxymethyl cellulose (CMC; soluble), PASC (10-20%), filter paper (50%), and Avicel ™ *(70%).
^{e}Activity not detected in a 15 h digestion period

[0246] Cel5B, Cel5D, and Cel5F exhibited product distributions typical of classical endoglucanases with ratios of soluble to insoluble products similar to that of other endoglucanases. The processivity ratios for Cel5G′ and Cel5J′, however, were all found to be significantly greater than 2 and each degraded filter paper, Avicel™, and pNP-cellobioside like Cel5H. Due to the presence of two distinct GH5 domains in Cel5A, processivity of the GH5 domains of this enzyme were not tested. The processivity of the other enzymes of clade 2 suggests that all of the GH5 domains of clade 2 are associated with processive activity. Interestingly, the activity of these processive endoglucanses was not dependent upon the activity of classic endoglucanases. For example, Cel5H was not synergistic with Cel5D, Cel5F, and Cel5G at three different molar ratios (1:4, 1:1, and 4:1), indicating that the enzyme does not recognize the free nonreducing ends of cellulose polymers like cellobiohydrolases (Table S6).

TABLE S6
Synergy within the S. degradans system

| | | Yield of Glucose (μg)^{a} | | | |
|---|---|---|---|---|---|
| | Nanomoles | Independent | Theoretical | Actual | |
| Cellulase | Cellulase | Yield^{b} | Yield^{c} | Yield | DoS^{d} |
| Cel5D | 1 | 0.26 ± 0.15^{e} | | | |
| Cel5F | 1 | 1.64 ± 0.045 | | | |
| | 0.5 | 1.23 ± 0.081 | | | |
| Cel5G | 0.8 | 6.17 ± 0.33 | | | |
| | 0.5 | 4.92 ± 0.79 | | | |
| | 0.2 | 2.64 ± 0.09 | | | |
| Cel5H | 0.1 | 20.4 ± 0.71^{e} | | | |
| | 0.8 | 18.7 ± 0.44 | | | |
| | 0.5 | 15.8 ± 2.27 | | | |
| | 0.2 | 11.1 ± 3.9 | | | |
| Cel5D + Cel5H | 1 + 0.1 (10:1) | | 20.7 | 12.2 ± 0.78 | 0.59 |
| Cel5F + Cel5H | 1 + 0.2 (5:1) | | 12.7 | 12.4 ± 0.44 | 0.98 |
| Cel5G + Cel5H | 0.8 + 0.2 (4:1) | | 17.3 | 12.0 ± 0.62 | 0.69 |
| | 0.5 + 0.5 (1:1) | | 20.7 | 16.9 ± 0.54 | 0.82 |
| | 0.2 + 0.8 (1:4) | | 21.3 | 19.3 ± 0.73 | 0.91 |
| Cel5G + Cel5F | 0.5 + 0.5 (1:1) | | 6.2 | 6.09 ± 0.27 | 0.98 |

^{a}The yield of glucose is measured from a two hour filter paper assay as described
^{b}The independent yield was measured after two hours as described for the filter paper assay
^{c}The sum of the μg glucose produced for both the S. degradans cellulases independently
^{d}DoS: The degree of synergy: The actual yield divided by the theoretical yield
^{e}Yield after 15 hours due to low activity of Cel5D

### Example 11

### Bacterial Growth Media and Conditions

[0247] Saccharophagus degradans 2-40^{T} (ATCC 43961) was grown in minimal medium containing (per liter) 2.3% Instant Ocean (Aquarium Systems, Mentor, Ohio), 0.05% Yeast Extract, 0.5% (w/v) ammonium chloride, and 16.7 mM Tris-HCl, pH 8.6 supplemented by 0.2% carbon source using standard protocols. Escherichia coli, DH5a (Invitrogen, Frederick, Md.) and Rosetta2™ (DE3) (Novagen, Madison, Wis.) strains were grown at 37° C. in Luria-Bertani (LB) broth or agar supplemented with the appropriate antibiotics. Antibiotics were added to media at the indicated concentrations (in μg/ml): chloramphenicol, 30; and kanamycin (Kan), 50.

### Example 12

### Bioinformatic Analyses

[0248] Similarities to the S. degradans sequences were based on local alignments obtained through the BLAST program. (Altschul et al. (1997) Gapped BLAST and PSI-BLAST: a new generation of protein database search programs. Nucleic Acids Res 25:3389-3402). Domain architectures were ascertained using SMART. (Schultz et al. (1998) SMART, a simple modular architecture research tool: Identification of signaling domains. Proc Natl Acad Sci USA 95:5857-5864). Multiple sequence alignments were created using clustalX 1.81, and manually adjusted where appropriate. (Thompson et al (1997) The CLUSTAL_X windows interface: flexible strategies for multiple sequence alignment aided by quality analysis tools. Nucleic Acids Res 25:4876-4882). The neighbor-joining algorithm was executed via the ClustalX 1.81 using the “Exclude Positions with Gaps” and “Correct for Multiple Substitutions” options. Statistical support for tree topology was provided by 1000 bootstrap trials.

### Example 13

### Molecular Cloning of S. Degradans GH5 Cellulases

[0249] S. degradans genomic DNA was isolated by using a commercial genomic DNA purification kit (Promega, Madison, Wis.). Sequences of annotated GH5 cellulases were extracted from the S. degradans genome sequence (http://maple.lsd.ornl.gov) and tailed primers were designed to amplify each individual GH5 cellulase by PCR (Table S2). Amplified fragments were ligated into pET28b (Novagen) as a BamH1-EcoR1 (Table S2) or BamH1-XhoI fragments (Table S2) to create in-frame amino and carboxy terminal 6×-His fusions and transformed into E coli DH5α. After confirmation of the correct construct in Kan^{R} transformants by nested PCR and/or sequencing, the resulting plasmid constructs were isolated and transformed into E. coli Rosetta2™ (DE3) for expression.

### Example 14

### Purification of Cellulases

[0250] Twenty ml of overnight Rosetta2™ (DE3)(pHZ-Cel) culture were inoculated into 500 ml LB broth and grown at 37° C. for 2 hours. Expression of cloned genes was induced by the addition of IPTG to a final concentration of 0.2 mM when OD₆₀₀=0.6. The culture was then incubated overnight at 15° C. with mild shaking. Cells from induced cultures were harvested and resuspended in 50 mM sodium phosphate, 300 mM sodium chloride, 10 mM imidizole, pH 8.0 and 0.5 mM Phenyl methyl sulfonyl fluoride. Lysozyme was added to a concentration of 1 mg/ml and the cell suspension incubated on ice for 30 minutes. Lysis of cells was completed using five 30s cycles in a Bead Beater™ (Biospec Products). The lysate was clarified by centrifugation at 10,000 RPM for 20 minutes. The expressed proteins in cleared lysates were purified using chelated Ni-NTA (Nitriltriacetic acid) chromatography according to the manufacturer's recommendations (Qiagen, 2003). The protein concentration was determined by the Pierce microBCA protein assay reagent kit (23235) using bovine serium albinum (BSA) as the standard.

### Example 15

### Zymograms

[0251] An adaptation of the procedures of Taylor et al was used to prepare zymograms. (Taylor et al (2006) Complete cellulase system in the marine bacterium Saccharophagus degradans strain 2-40(T). J Bacteriol 188:3849-3861). Samples and gels were prepared as in standard sodium dodecyl sulfate polyacrylamide gel electrophoresis (SDS-PAGE) with the indicated substrate incorporated directly into the resolving gel at a final concentration of 0.1% (w/v) for barley β-glucan (medium viscosity; Megazyme) or HE-cellulose. After electrophoretic fractionation of the proteins, gels were washed twice in distilled water and incubated in 30 ml of refolding buffer (20 mM PIPES (piperazine-N,N′-bis(2-ethanesulfonic acid)) buffer (pH 6.8), 2.5% Triton X-100, 2 mM dithiothreitol, 2.5 mM CaCl₂) for 1 hour at 20° C. and then held overnight in fresh refolding buffer at 4° C. The gels were washed twice in 20 mM PIPES buffer pH 6.8 and incubated for 12 h at 37° C. in fresh PIPES buffer. Residual substrate was visualized by staining with 0.25% Congo red.

### Example 16

### Enzyme Assays

[0252] Most assays were performed at pH 6.5 and 50° C. in a reaction mixture containing 1% Instant Ocean™ 20 mM PIPES buffer, and 0.01-1.0 nmol purified enzyme for soluble substrates and 0.1-2.0 nmol purified enzyme for insoluble substrates. The DNS (Dinitrosalicylic acid) assay was used to detect product formation unless indicated otherwise (32). All assays were performed in triplicate and reported as the mean with the percent error. For alternative pH conditions, 20 mM MES (2-(N-morpholino)ethanesulfonic acid) for pH 3-6, 20 mM PIPES (1,4-piperazinediethanesulfonic acid) for pH 6-7 or 20 mM Tris (2-Amino-2-(hydroxymethyl)propane-1,3-diol) for pH 7-8.5 were employed. The ionic strength of the reaction mixture was adjusted by the addition of 0-10% (w/v) Instant Ocean™.

[0253] The CMC assay was performed with 1% substrate in a total volume of 0.4 ml for a 15 min reaction time. Phosphoric acid swollen cellulose (PASC) was prepared as described Zhang et al. (2006). Biomacromolecules 7:644-648. The PASC (1 mg) assay was performed in a total volume of 0.15 ml for 30 minutes. Avicel™ (1 mg), or Whatman #1 filter paper (3 mg) was assayed in a total volume of 0.15 ml for 2 hours. The reaction was stopped by incubation for 3 minutes at 95° C. and the substrate separated by centrifugation at 10,000 rpm. The products of the insoluble substrates were digested with 0.45 nanomoles of the β-glucosidase S. degradans Bgl1A in a total volume of 0.2 ml at 50° C. for 1 hour. After 1 hour at 50° C., the β-glucosidase was inactivated by incubation for 3 minutes at 95° C. Glucose oxidase (Sigma GAGO-20) was added to a volume of 0.4 ml and incubated at 37° C. for 30 minutes. 0.4 ml of 12 N sulfuric acid was added and the glucose concentration was measured at OD₅₄₀ in comparison with a glucose standard curve. (Park et al. (2002) Molecular cloning and characterization of a unique β-glucosidase from Vibrio cholerae. J Biol Chem 277:29555-29560). Release of cellobiose was calculated at 50% the rate of glucose accumulation.

[0254] pNP-cellobioside activity was measured using 0.1 ml of 125 mM pNP-cellobioside in a total volume of 0.4 ml at 50° C. for 15 minutes. After incubation, the OD₄₀₀ was used to calculate the rate of nitrophenol release.

[0255] Total digestibility of cellulose was evaluated using 20 mg cotton linters (Sigma 435236) in a final volume of 1.0 ml in PIPES assay buffer with 2.0 nmols of the indicated enzyme and 1.25 nmols of β-glucosidase (S. degradans Bgl1A). At each time point 0.1 ml was removed and released sugar determined using the glucose oxidase assay as described above. Accellerase 1000 (Genecor Corp). was used to determine overall substrate accessibility.

### Example 17

### Assessment of Synergy

[0256] Evaluation of synergy between enzymes employed the filter paper assay as described above. T. fusca Cel9B and T. fusca Cel6B were used as reference enzymes of known activity (gifts of Professor David Wilson, Cornell University). Each assay utilized 1.0 nmol of S. degradans and 0.1 nmol the indicated T. fusca enzyme. Reaction conditions were as described above for the filter paper assay.

### Example 18

### Viscosity Measurements

[0257] Viscosity was monitored using a cross-arm viscometer (ASTM D455 and D2170). T. fusca Cel6B (0.01 nmol), S. degradans Cel5H (0.01 nmol) or T. fusca Cel9B (0.001 nmol) was added to 2.0 ml 1% CMC in assay buffer. The viscosity of the reaction mixture was measured periodically between 0.5-20 minutes.

### Example 19

### Thin Layer Chromatography

[0258] One μl samples were spotted onto Fisher (5729-6) silica gel 60 plates and air dried. Chromatograms were developed using nitromethane, 1-propanol, and water (2:5:1.5) (v:v:v) (35). Two ascents of the solvent were used to ensure high resolution. The plate was dipped in 5% (v/v) sulfuric acid in methanol and heated to 140° C. for 5 minutes to visualize resolved products.

### Example 20

### Processivity

[0259] The processivity was evaluated by the filter paper assay as described by Zhang et al. (2000). Eur J Biochem 267:3101-3115. The reducing sugar in the soluble fractions was measured as described above and reported in μmols of cellobiose. The insoluble reducing sugar was determined using a modified 2,2′-bicinchoninate (BCA) assay as described by Doner and Irwin (1992). Anal Biochem 202:50-53. At the end of the assay period, the filter paper was washed with 6M guanidine HCL to remove any bound protein. The filter paper disc was then washed 4 times with assay buffer and water. (Zhang et al. (2000), Eur J Biochem 267:3101-3115). The retained reducing sugar was measured using the Pierce microBCA reagent kit using glucose standards. The processivity was determined using 0.1-1 nmols S. degradans cellulases and 0.1 nmols of T. fusca Cel6A and T. fusca Cel6B.

### Example 21

### Expression of S. Degradans Cel5G, Cel5H, and Bgl1A in S. Degradans

[0260] Unless otherwise indicated, the recombinant DNA techniques utilized in the present example are standard procedures, well known to those skilled in the art. Such techniques are described and explained throughout the literature in sources such as, J. Perbal, A Practical Guide to Molecular Cloning, John Wiley and Sons (1984); J. Sambrook et al., Molecular Cloning: A Laboratory Manual, Cold Spring Harbor Laboratory Press (1989); T. A. Brown (editor), Essential Molecular Biology: A Practical Approach, Volumes 1 and 2, IRL Press (1991); D. M. Glover and B. D. Hames (editors), DNA Cloning: A Practical Approach, Volumes 1-4, IRL Press (1995 and 1996); and F. M. Ausubel et al. (Editors), Current Protocols in Molecular Biology, Greene Pub. Associates and Wiley-Interscience (1988, including all updates until present). These publications are incorporated herein by reference.

[0261] Isolation of Genomic DNA. Genomic DNA may be isolated using any method known in the art. Briefly, S. degradans was grown in a growth medium, as described herein elsewhere. Genomic DNA was isolated from the cells using standard techniques.

[0262] PCR was performed on a standard PCR machine under standard conditions. Briefly, PCR reactions contained 10 pMol of forward and reverse primers, 1 μl of 10 mM DNTPs, 1.5 μl of 100 mM MgCl₂, and 1 μl Proof Pro® Pfu Polymerase in a 501 reaction with 0.5 μl of S. degradans genomic DNA as the template. PCRs conditions used standard parameters for tailed primers and Pfu DNA polymerase. PCR products were cleaned up with the QIAGEN QIAquick PCR Cleanup kit and viewed in 0.8% agarose gels.

[0263] The primers used for amplification were as follows:

Zym5F Bam CCCGCGGATCCTGCTAAGCCGGAGGAAACC
Zym5R Kpn CCGGGGTACCATAAGCACGAACTTTAACGT
Zym6F Xba GCTCTAGAAAGGCGCATTGCGCCAACTAT
Zym6R Xma TCCCCCCGGGACTGACTAGAACCCACCATCT T
Zym9F Bam CCCGGATCCAATTCTTAGCGGTGGCCAGCAA
Zym9R Xho CCCGCTCGAGCCAGCTACCAAATTGCAGGGTGT
pET F Xba CTAGTCTAGAAACTTTAAGAAGGAGATATACCAT
pET R Sma TCCCCCCGGGATCTCAGTGGTGGTGGTGGTGGTG

[0264] The gene for Zym9 was first cloned into the cloning vector pET28b. The genes were then amplified from the pET clones using the primers pETF and pETR and ligated into pDSK600 before transformation into S. degradans.

[0265] Following cleanup and confirmation of size, PCR products are ligated into the pDSK600 plasmid. The pDSK600 plasmid is a broad host plasmid and contains a SpR marker and robust 3× placUV promotor.

[0266] Competent S. degradans cells are then prepared. Briefly, a culture of S. degradans was grown to OD600 0.6-1.0. The culture is placed on ice for 15 min and then centrifuge for 10 min at 4° C. Resuspend by 0.7 mol/L sucrose, centrifuge at 4° C., 8000 rpm for 10 min. Repeat above procedure for 2 times.

[0267] The pDSK600/Zym5, pDSK600/Zym6, pDSK600/Zym8, and pDSK600/Zym9 expression vectors were then electroporated into the S. degradans competent cell. Briefly the electroporation was performed using 0.2 mm cuvette at 1500V; 3 μl pDSK600 for 50 μl cells. The cells were then transferred to 1 ml fresh medium and subculture for 3-4 h. The cells where then spread on plates with antibiotics.

[0268] Zymogram of Zym5 and Zym8 grown on Avicel. Activity assays were then performed. Briefly, a culture of the Zym and wild type S. degradans strains were prepared. The cells were then lysed to make the enzyme samples. Next, 100 ul enzyme was incubated with 100 ul CMC and 200 ul buffer for 15 min. Then 1 ml DNS reagents was added and boiled for 15 min. Absorbance at OD600 was measured.

TABLE
Overexpression of Endoglucanases

| | | | Activities | Activities |
|---|---|---|---|---|
| | Enzyme Over | | compared with | compared with |
| Strain | Expressed | Secretion | WT (Avicel) | WT (Glucose) |
| Zym5 | Cel5G | + | 3.5 | 108 |
| Zym7 | Cel5G | (−) | 1.7 | 291 |
| Zym8 | Cel5J | (−) | 0.9 | 77 |
| Zym9 | Cel5H | + | 2.6 | 691 |

(−) Deleted secretion signal on polypeptide

TABLE
Overexpression β-Glucosidase

| | | | Activities | Activities |
|---|---|---|---|---|
| | Enzyme Over | | compared with | compared with |
| Strain | Expressed | Secretion | WT (Avicel) * | WT (Glucose) * |
| Zym6 | Bgl1A | (−) | 29 | 105 |

(−) Deleted secretion signal on polypeptide
* Degradation of cellobiose

### Example 22

### Zym Strains Evaluation

[0269] Protein preps. Frozen cultures of Zym5, Zym6, Zym9, and the wild-type S. degradans 2-40 were used to inoculate 5 mL of the 2-40 medium supplemented with 0.2% glucose. The strains were gown overnight at 29° C. on a orbital shaker. Densities of the bacterial cultures were measured spectrophotometrically at 600 nm. Densities of these cultures were normalized (adjusted to OD₆₀₀ 0.793). Two milliliters of the normalized cultures were used to inoculate 50 mL of the 2-40 medium containing 1% Avicel. The Avicel cultures were incubated for 27 hrs at 29° C. on a orbital shaker at 200 rpm. Densities of the cultures were measured again. Since Avicel is insoluble in water, the OD₆₀₀ readings were taken after 30-min settling period. The cells and the medium were separated by centrifugation at 7,000×g for 15 minutes. The OD₆₀₀ readings were used to normalize protein preps. The cell protein preps were obtained by osmotic lysis of the S. degradans cells in deionized water. Amount of the water added to the cells, and dilution factor for the medium protein preps were calculated based on the OD₆₀₀ readings. See FIG. 22.

[0270] For evaluation of the cellulase activity of the cell and the media protein preps, AZCL-HE-Cellulose was used (Megazyme). AZCL-HE-Cellulose is a chromogenic water-insoluble substrate for cellulases. A typical reaction mixture used in this experiment contained 2 mg of the substrate, 900 μL of 50 mM citrate buffer, pH 6.0, and 100 μL of the protein prep. Upon degradation of this substrate by the enzymes, a blue dye is released into the reaction mixture. Amount of the dye released per time period is proportional to the cellulolytic activity in the reaction mixture. The reaction mixtures were incubated at 50 C for 3 hrs, and absorbance of the supernatant was measured at 590 nm. The OD₅₉₀ readings were used to produce the data shown in FIG. 25. Comparison of the cellulase preps from different strains was performed on “per cell” basis. Total cellulase activity of the protein preps from the medium and the cells of the wild-type S. degradans was equal.

### EQUIVALENTS AND INCORPORATION BY REFERENCE

[0271] Those skilled in the art will recognize, or be able to ascertain using no more than routine experimentation, numerous equivalents to the specific polypeptides, nucleic acids, methods, assays and reagents described herein. Such equivalents are considered to be within the scope of this invention and are covered by the following claims.

[0272] The instant application includes numerous citations to learned texts, published articles and patent applications as well as issued U.S. and foreign patents. The entire contents of all of these citations are hereby incorporated by reference herein.

### REFERENCES CITED

[0273] 1 Altschul, S. F. et al (1997) Gapped BLAST and PSI-BLAST: a new generation of protein database search programs. Nucleic Acids Res 25:3389-3402.
[0274] 2 Andrykovitch, G. and I. Marx (1988) “Isolation of a new polysaccharide-digesting bacterium from a salt marsh.” Applied and Environmental Microbiology 54: 3-4.
[0275] 3 Bayer, E. A., Chanzy, H., Lamed, R., and Shoham, Y. (1998) Cellulose, cellulases and cellulosomes. Curr Opin Struc Biol 8:548-557.
[0276] 4 Beguin, P. and J. P. Aubert (1994) “The biological degradation of cellulose.” FEMS Microbiol Rev 13(1): 25-58.
[0277] 5 Boraston, A. B., Bolam, D. N., Gilbert, H. J., and Davies, G. J. (2004) Carbohydrate-binding modules: fine-tuning polysaccharide recognition. Biochem J 382:769-781.
[0278] 6 Breyer, W. A. and Matthews, B. W. (2001) A structural basis for processivity. Protein Sci 10:1699-1711.
[0279] 7 Chakravorty, D. (1998). Cell Biology of Alginic Acid degradation by Marine Bacterium 2-40. College Park, University of Maryland.
[0280] 8 Cohen, R., Suzuki, M. R., and Hammel, K. E. (2005) Processive endoglucanase active in crystalline cellulose hydrolysis by the brown rot basidiomycete Gloeophyllum trabeum. Appl Environ Microbiol 71:2412-2417.
[0281] 9 Coutinho, P. M. and B. Henrissat (1999) Carbohydrate-active enzyme server. Accessed Jan. 21, 2004.
[0282] 10 Coutinho, P. M. and B. Henrissat (1999) The modular structure of cellulases and other carbohydrate-active enzymes: an integrated database approach. Genetics, biochemistry and ecology of cellulose degradation. T. Kimura. Tokyo, Uni Publishers Co: 15-23. Distel, D. L., W. Morrill, et al. (2002) “Teredinibacter turnerae gen. nov., sp. nov., a dinitrogen-fixing, cellulolytic, endosymbiotic gamma-proteobacterium isolated from the gills of wood-boring mollusks (Bivalvia: Teredimidae).” Int J Syst Evol Microbiol 52(6): 2261-2269.
[0283] 11 Doi, R. H. and Kosugi, A. (2004) Cellulosomes: Plant-cell-wall-degrading enzyme complexes. Nat Rev Microbiol 2:541-551.
[0284] 12 Doner, L. W. and Irwin, P. L. (1992) Assay of reducing end-groups in oligosaccharide homologs with 2,2′-bicinchoninate. Anal Biochem 202:50-53.
[0285] 13 Ducros, V. et al (1995) Crystal-structure of the catalytic domain of a bacterial cellulase belonging to family-5. Structure 3:939-949.
[0286] 14 Ensor, L., S. K. Stotz, et al. (1999) “Expression of multiple insoluble complex polysaccharide degrading enzyme systems by a marine bacterium.” J Ind Microbiol Biotechnol 23: 123-126.
[0287] 15 Ghose, T. K. (1987) Measurement of cellulase activities. Pure Appl Chem 59:257-268.
[0288] 16 Gilad, R. et al (2003) Cell, a noncellulosomal family 9 enzyme from Clostridium thermocellum, is a processive endoglucanase that degrades crystalline cellulose. J Bacteriol 185:391-398.
[0289] 17 Gonzalez, J. and R. M. Weiner (2000) “Phylogenetic characterization of marine bacterium strain 2-40, a degrader of complex polysaccharides.” International journal of systematic evolution microbiology 50: 831-834.
[0290] 18 Henrissat, B. and A. Bairoch (1993) “New families in the classification of glycosyl hydrolases based on amino acid sequence similarities.” Biochem J 293 (Pt 3): 781-8.
[0291] 19 Henrissat, B., T. T. Teeri, et al. (1998) “A scheme for designating enzymes that hydrolyse the polysaccharides in the cell walls of plants.” FEBS Lett 425(2): 352-4.
[0292] 20 Himmel, M. E. (2007) Biomass recalcitrance: engineering plants and enzymes for biofuels production. Science 316:982-982.
[0293] 21 Horn, S. J. et al (2006) Costs and benefits of processivity in enzymatic degradation of recalcitrant polysaccharides. Proc Natl Acad Sci USA 103:18089-18094.
[0294] 22 Howard, M. B. et al (2004) Identification and analysis of polyserine linker domains in prokaryotic proteins with emphasis on the marine bacterium Microbulbifer degradans. Protein Sci 13:1422-1425.
[0295] 23 Irwin, D. C., Spezio, M., Walker, L. P., and Wilson, D. B. (1993) Activity studies of 8 purified cellulases-specificity, synergism, and binding domain effects. Biotechnol and Bioeng 42:1002-1013.
[0296] 24 Jeoh, T., Wilson, D. B., and Walker, L. P. (2006) Effect of cellulase mole fraction and cellulose recalcitrance on synergism in cellulose hydrolysis and binding. Biotechnol Progr 22:270-277.
[0297] 25 Jonsson, A. P., Y. Aissouni, et al. (2001) “Recovery of gel-separated proteins for in-solution digestion and mass spectrometry.” Anal Chem 73(22): 5370-7.
[0298] 26 Kang, M. S. et al (2007) Effect of Leuconastoc spp. on the formation of Streptococcus mutans biorilm. J Microbiol 45:291-296.
[0299] 27 Kelley, S. K., V. Coyne, et al. (1990) “Identification of a tyrosinase from a periphytic marine bacterium.” FEMS Microbiol Lett 67: 275-280.
[0300] 28 Kosugi, A., K. Murashima, et al. (2002) “Characterization of two noncellulosomal subunits, ArfA and BgaA, from Clostridium cellulovorans that cooperate with the cellulosome in plant cell wall degradation.” J Bacteriol 184(24): 6859-65.
[0301] 29 Kumar, R., Singh, S., and Singh, O. V. (2008) Bioconversion of lignocellulosic biomass: biochemical and molecular perspectives. J Ind Microbiol Biot 35:377-391.
[0302] 30 Laemmli, U. K. (1970). “Cleavage of structural proteins during the assembly of the head of the bacteriophage T4.” Nature 277: 680-685.
[0303] 31 Li, Y. C., Irwin, D. C., and Wilson, D. B. (2007) Processivity, substrate binding, and mechanism of cellulose hydrolysis by Thermobifida fusca Cel9A. Appl Environ Microbiol 73:3165-3172.
[0304] 32 Ljungdahl, L. G. and K. E. Eriksson (1985) Ecology of Microbial Cellulose Degradation. Advances in Microbial Ecology. New York, Plenum Press. 8: 237-299.
[0305] 33 Lo Leggio, L. and Larsen, S. (2002) The 1.62 angstrom structure of Thermoascus aurantiacus endoglucanase: completing the structural picture of subfamilies in glycoside hydrolase family 5. FEBS Lett 523:103-108.
[0306] 34 Lou, J., K. Dawson, et al. (1996) “Role of phosphorolytic cleavage in cellobiose and cellodextrin metabolism by the ruminal bacterium Prevotella ruminicola.” Appl. Environ. Microbiol. 62(5): 1770-1773.
[0307] 35 Lynd, L. R., P. J. Weimer, et al. (2002) “Microbial cellulose utilization: fundamentals and biotechnology.” Microbiol Mol Biol Rev 66(3): 506-77, table of contents.
[0308] 36 Martinez, D. et al (2008) Genome sequencing and analysis of the biomass-degrading fungus Trichoderma reesei (syn. Hypocrea jecorina). Nat Biotechnol 26:1193-1193.
[0309] 37 Park, J. K., Wang, L. X., Patel, H. V., and Roseman, S. (2002) Molecular cloning and characterization of a unique β-glucosidase from Vibrio cholerae. J Biol Chem 277:29555-29560.
[0310] 38 Qi, M., Jun, H. S., and Forsberg, C. W. (2007) Characterization and synergistic interactions of Fibrobacter succinogenes glycoside hydrolases. Appl Environ Microbiol 73:6098-6105.
[0311] 39 Qi, M., Jun, H. S., and Forsberg, C. W. (2008) Cel9D, an atypical 1,4-1′-D-glucan glucohydrolase from Fibrobacter succinogenes: characteristics, catalytic residues, and synergistic interactions with other cellulases. J Bacteriol 190:1976-1984.
[0312] 40 Rubin, E. M. (2008) Genomics of cellulosic biofuels. Nature 454:841-845.
[0313] 41 Sakon, J., Irwin, D., Wilson, D. B., and Karplus, P. A. (1997) Structure and mechanism of endo/exocellulase E4 from Thermomonospora fusca. Nat Struct Biol 4:810-818.
[0314] 42 Schultz, J., Milpetz, F., Bork, P., and Ponting, C. P. (1998) SMART, a simple modular architecture research tool: Identification of signaling domains. Proc Natl Acad Sci USA 95:5857-5864.
[0315] 43 Shevchenko, A., M. Wilm, et al. (1996) “Mass spectrometric sequencing of proteins silver-stained polyacrylamide gels.” Anal Chem 68(5): 850-8.
[0316] 44 Smith, R. D., J. A. Loo, et al. (1990) “New developments in biochemical mass spectrometry: electrospray ionization.” Anal Chem 62(9): 882-99.
[0317] 45 Stotz, S. K. (1994). An agarase system from a periphytic prokaryote. College Park, University of Maryland.
[0318] 46 Sumner, J. B. and E. B. Sisler (1944) “A simple method for blood sugar.” Archives of Biochemistry 4: 333-336.
[0319] 47 Taylor, L. E. et al (2006) Complete cellulase system in the marine bacterium Saccharophagus degradans strain 2-40(T). J Bacteriol 188:3849-3861.
[0320] 48 Thompson, J. D. et al (1997) The CLUSTAL_X windows interface: flexible strategies for multiple sequence alignment aided by quality analysis tools. Nucleic Acids Res 25:4876-4882.
[0321] 49 Tomme, P., R. A. Warren, et al. (1995) “Cellulose hydrolysis by bacteria and fungi.” Adv Microb Physiol 37: 1-81.
[0322] 50 Violot, S. et al (2005) Structure of a full length psychrophilic cellulase from Pseudoalteromonas haloplanktis revealed by x-ray diffraction and small angle x-ray scattering. J Mol Biol 348:1211-1224.
[0323] 51 Warren, R. A. (1996) “Microbial hydrolysis of polysaccharides.” Annu Rev Microbiol 50: 183-212.
[0324] 52 Weiner, R. M. et al (2008) Complete genome sequence of the complex carbohydrate-degrading marine bacterium, Saccharophagus degradans strain 2-40(T). PLOS Genet. 4:e100087
[0325] 53 Whitehead, L. (1997). Complex Polysaccharide Degrading Enzyme Arrays Synthesized By a Marine Bacterium. College Park, University of Maryland.
[0326] 54 Wilson, D. B. (2004) Studies of Thermobifida fusca plant cell wall degrading enzymes. Chem Rec 4:72-82.
[0327] 55 Wilson, D. B. (2008) Three microbial strategies for plant cell wall degradation. Ann NY Acad Sci 1125:289-297.
[0328] 56 Xie, G. et al (2007) Genome sequence of the cellulolytic gliding bacterium Cytophaga hutchinsonii. Appl Environ Microbiol 73:3536-3546.
[0329] 57 Zhang, S., Barr, B. K., and Wilson, D. B. (2000) Effects of noncatalytic residue mutations on substrate specificity and ligand binding of Thermobifida fusca endocellulase Cel6A. Eur J Biochem 267:244-252.
[0330] 58 Zhang, S., Irwin, D. C., and Wilson, D. B. (2000) Site-directed mutation of noncatalytic residues of Thermobifida fusca exocellulase Cel6B. Eur J Biochem 267:3101-3115.
[0331] 59 Zhang, Y. H. P., Cui, J. B., Lynd, L. R., and Kuang, L. R. (2006) A transition from cellulose swelling to cellulose dissolution by o-phosphoric acid: Evidence from enzymatic hydrolysis and supramolecular structure. Biomacromolecules 7:644-648.
[0332] 60 Zhang, Y. H. P., Himmel, M. E., and Mielenz, J. R. (2006) Outlook for cellulase improvement: Screening and selection strategies. Biotechnol Adv 24:452-481.

What is claimed is:

1. A genetically modified host cell, wherein said host cell is genetically modified with one or more isolated nucleic acids selected from the group consisting of:
a. a polynucleotide having a sequence of Cel5A, Cel5G, Cel5H, or Cel5J;
b. a polynucleotide encoding a polypeptide having a sequence of Cel5A, Cel5G, Cel5H, or Cel5J;
c. a polynucleotide having at least 95% sequence identity to a polynucleotide having a sequence of Cel5A, Cel5G, Cel5H, or Cel5J, wherein the polynucleotide encodes a polypeptide having processive endoglucanase activity;
d. a polynucleotide encoding a polypeptide having at least 95% sequence identity to a polypeptide having a sequence of that encodes any of Cel5A, Cel5G, Cel5H, or Cel5J, wherein the polynucleotide encodes a polypeptide having processive endoglucanase activity; and
e. a polynucleotide that hybridizes under stringent conditions to the complement of any of the polynucleotides of a) through d) above, wherein the polynucleotide encodes a polypeptide having processive endoglucanase activity.

2. The genetically modified host cell of claim 1, wherein the expression of the polynucleotide in the host cell results in increased yield of cellobiose in the presence of cellulosic material.

3. The genetically modified host cell of claim 1, wherein the expression of the polynucleotide in the host cell is at least 50-fold over control levels.

4. The genetically modified host cell of claim 1, wherein the host cell is Saccharophagus degradans.

5. A method of producing a genetically modified host cell containing an isolated nucleic acid encoding a polypeptide, wherein the method comprises the steps of transforming a host cell with an expression vector comprising the nucleic acid, wherein the nucleic acid comprises a polynucleotide selected from the group consisting of:
a. a polynucleotide having a sequence that encodes any of Cel5A, Cel5G, Cel5H, or Cel5J;
b. a polynucleotide encoding a polypeptide having a sequence of Cel5A, Cel5G, Cel5H, or Cel5J;
c. a polynucleotide having at least 95% sequence identity to a polynucleotide having a sequence as that encodes any of Cel5A, Cel5G, Cel5H, or Cel5J, wherein the polynucleotide encodes a polypeptide having processive endoglucanase activity;
d. a polynucleotide encoding a polypeptide having at least 95% sequence identity to a polypeptide having a sequence of Cel5A, Cel5G, Cel5H, or Cel5J, wherein the polynucleotide encodes a polypeptide having processive endoglucanase activity; and
e. a polynucleotide that hybridizes under stringent conditions to the complement of any of the polynucleotides of a) through d) above, wherein the polynucleotide encodes a polypeptide having processive endoglucanase activity.

6. The method of claim 5, wherein the nucleic acid is operably linked to one or more regulatory sequences.

7. The method of claim 5, wherein the regulatory sequence is a promoter.

The application's sequence listing, which the Patent Office published only in electronic form, follows.

SEQUENCE LISTING (242 sequences)

SEQ ID NO: 1 - protein, 1167 aa, Microbulbifer degradans
MTIKRWPFDRKGPPKKPNAKKLLASLAAALSLTAMQSTAAVEPLQTSGNQILVGNQAKALGGHSLFWHNVPAAGSLYNADTVSRLKNDWNSKVIRAAIGVEVPFNSENTYIGNKGSSLAAIDRVVNAAVANDMYVIIDFHTHHADQVENVAHDFFNEVSSRYGHLNNVIYEVFNEPEWCGEHGRWASTIKPYAERVIQTIRNNDPDNLVIVGTTCFSQDVDVAAADPINDVNVAYTLHFYAATPAHQQPLRDKAQTALDRGAPLFVTEWGTTTFTGDGFVDEAQTRTWINWLNERGISHVNWSASTQPESSAIWNGDMTYKHSGLLVGELVQQTNGTTTPPTGEISGPCDLHFVPAKAEAESFCTAKGIQFETTTDTGGGQNMGWLDAGDWVTFDVDVPASGQYLIDYRVASELGDGRFRTEAANGTALGTISVPNTGGWQNWQTHTHTVQLSQGTQTVKLVAETGGWNLNWFEVRAGEVCEGADCPCEGAECPCPDCNGTPVKFEAETFVAMQGVQLENTSDVGGGQNVGYIDSGDWITYNGALPASADNRYVVSYRVARQPSGNAKFKIEQPGGAAVYGEISVPSTGGWQTWTTISHTITIPANANGFALAAIDGGWNINWIEIKPATTQPPEPINPLKLQAEDYINFNDTTPGNEGGAHRSDDVDIQATTDTGGGFNVGWVDAGEWLEYEFFLESPDFYAADVRVASDQTGGALQLQIDGQNVGQAITVGNTGGWQAWTTKNTLIGDLSAGTHTLRVYAQSGPLNLNWVELKRTTPAPATSCFNIAEDRLNVHLDAHCTAGSNLQYNWDFGDGNSATGVATSHSYYTSGTYTITLTVSDTRTTDTSSQQVTVDFSAPAGPVDFYGELMVNGNRIHGEKTGEPAQVRGMSFFWSNTGWGQEKWWNASTVDRMVDEFKVELVRGAMGTDEGGGYLHDASNKARLQAVVEQAIARNVYVIIDWHTHHAEDNIAEAITFFSEMAQLYGHHDNVIFEIYNEPLNTTSWGTIKHYAEQVIPAIRAHSDNLIVVGTRTWSQNVDEAAFDKINDSNTAYALHFYVGSHGNHVRNLAQTALNNGAAIFASEWGIWPNNNYDGMNADDWMNFLDQNKISWANWAISDKVDPNTGQLEPPSMFNPDGSLSSNGQYVVNKLNEYAAQAPWREAIAN

SEQ ID NO: 2 - DNA, 3504 bp, Microbulbifer degradans
atgacaattaaacgttggccgttcgaccgaaaaggcccacctaaaaaacctaacgctaaaaaattactcgcaagcttagcggctgcactaagcttaaccgccatgcaaagcactgcagcggtagagccattacaaaccagcggcaatcaaattcttgttggcaaccaagccaaagcccttggcggccacagcttgttttggcataacgtgccggcagcaggcagcttatacaatgcagatacagtaagcaggcttaagaatgattggaactccaaggttattcgggccgcaattggggttgaagtacctttcaattcagaaaacacctacataggcaataagggcagctcgctggccgcaatagaccgcgtagttaatgccgctgttgccaacgatatgtatgtgattatcgattttcatactcaccatgcagatcaagtagaaaacgttgcccacgactttttcaacgaagtttctagccgttacggtcatttaaacaatgttatttatgaagtatttaacgagccagaatggtgtggcgagcacggtcggtgggcatctaccattaagccctacgccgagcgcgttatccaaaccattcgcaacaatgacccagacaacctagtaatagtaggcactacctgtttctcgcaagatgtagatgtagccgcagccgaccccattaacgatgtaaacgtggcctatacgctacacttttacgcagccacccctgcccaccagcaacccttgcgcgacaaggcccaaaccgcgctcgaccgcggcgcgccactatttgtaaccgaatggggtacaaccacatttacaggtgatggttttgtagatgaggcgcaaacgcgcacatggattaactggttaaacgaacgcggtattagccacgttaactggtcggcgtctacccagccagaaagctcagctatatggaatggcgacatgacctacaagcattcgggcttattggttggcgaactggtgcaacaaacaaatggcacaaccacgccaccaaccggtgaaataagtggcccgtgcgatttacattttgtacctgccaaagccgaggctgaaagcttctgtaccgccaaaggcattcaatttgaaaccaccaccgacacgggcggcggccaaaacatgggctggctagatgccggcgactgggtaacttttgatgtagatgtacctgctagcggccaatatttaatagattaccgcgtagcatcagagctaggtgatggtcggttccgcaccgaagccgccaacggcactgcccttggcacaatatctgtacccaataccggcggctggcagaattggcaaacgcacacacacacagtgcaactctcgcaaggcacacaaaccgttaaactagttgccgaaactggtggctggaacttaaattggtttgaagtgcgcgcaggtgaggtgtgcgaaggcgctgactgcccatgtgaaggagccgaatgcccttgcccagattgcaacggcacaccggttaagtttgaggcagaaacgtttgtggctatgcaaggcgtgcagctagaaaacacatccgatgtgggcggcggccaaaacgttggctacattgatagcggcgactggataacttacaacggggccttgcccgcaagtgcagacaaccgctatgtagtgtcttatagagtagcgcgtcaacctagcggcaatgccaaatttaaaatagaacagccaggtggagcagcggtatatggcgaaatttcggtgcccagcaccggcggctggcaaacatggacaaccattagccacaccataacaattcccgctaacgcaaacggctttgcactagcagcaatagatggcggttggaatataaactggatagaaataaaaccggcgaccactcaaccacccgagccaatcaacccgttaaaacttcaagctgaagattacatcaactttaacgacaccacccccggtaacgaaggcggtgcacacagaagcgatgatgtagatattcaagcaactaccgataccggtggcggttttaatgttggctgggtagacgctggcgaatggctagagtatgagttctttttagagtctcctgatttttatgcagctgatgtacgggttgcttcagaccaaactggcggcgcactgcaactacaaatagatggccaaaacgttggccaagccattaccgttggcaacaccggtggctggcaagcgtggacaaccaaaaacacactcattggcgacctaagtgcaggcacccacacgttgcgtgtatacgcgcaaagcggcccattaaatttaaactgggtagagctaaagcgtacaacgcccgcaccagccacttcgtgttttaatattgccgaagaccgcttaaacgttcacctagatgcgcactgtactgcaggcagcaacctgcaatacaattgggattttggtgacggcaacagcgcaaccggcgtagccactagccacagctactacactagcggcacttacaccattaccttaaccgttagtgatacccgcaccacagacacctctagccaacaggtaacggtagatttttctgcccctgcaggccctgtggatttttacggcgaactaatggtgaatggcaaccgcattcacggcgaaaaaaccggcgaacccgcacaagtacgcggcatgagctttttttggagcaacaccggttggggccaagaaaaatggtggaacgccagcaccgtggaccgcatggttgatgagttcaaagtagaacttgtgcgcggcgcaatgggcactgatgaaggcggcggttatttacacgacgcgtctaataaggctcgcttacaagcagttgttgaacaagccattgcacgcaatgtgtatgtaattatcgactggcacacccaccatgccgaagataacattgccgaagccattacattctttagcgaaatggcgcagctttatggccaccacgacaacgtgattttcgagatttacaacgagccattaaacaccacaagctggggcactattaagcactacgctgaacaagttattcctgctattcgcgctcattccgataatttaattgttgtgggcacgcgcacctggtcgcaaaacgtagacgaagccgcgttcgataaaattaacgacagcaacaccgcctacgccctgcacttttatgttggctcgcacggcaaccacgttcgcaacctagcacaaaccgcactaaacaacggcgcggctatttttgctagcgaatggggaatttggccaaacaacaactacgatggcatgaacgccgacgattggatgaactttttagaccaaaacaaaatatcttgggctaactgggccatatccgacaaagtagaccccaacacaggccaactagaaccacccagcatgttcaacccagacggcagcctaagcagtaatggtcaatatgtagtgaacaaactaaatgaatacgcagcacaagcaccgtggagggaggcaatcgctaattga

SEQ ID NO: 3 - protein, 133 aa, Microbulbifer degradans
MVVSLADNSAGAISCWHAKASPPEELEELLDEELELDELELEEELEELVEELLEELLDELLLDELEDEPLAAPPSLPPPQAVSPAKQLISSADFKKVSFRVQLNAVRVKSKRNINHSRIFLFWLFSHFRSRRC

SEQ ID NO: 4 - protein, 566 aa, Microbulbifer degradans
MFLLDFTRTAFSCTRKLTFLKSALLISCFAGLTACGGGSDGGAASGSSSSSSSSSSSSSSSSSSSTSSSSSSSSSSSSSSSSSSNSSSSSSGGDALACQHEMAPALLSASDTTMVQAEYYDTCASSALDNTTGNSGGELRTDDVDIVAIADGYAITDMQSGEYVEYSLTVQTSGLFDISFAVQPHAANTAGLALSVDGAVLGTVDIAANDSTAFGEYTLNGVYISDGAQVIRVTMAGEGAAIGLDSIAFNYTDNTVYTPENAVLGMGIGINLGNTLDAFPNEGDWAPAAQEYYFKAYKDAGFRHVRIPATWDDHTADTAPYAVNAARMDRTEQIVDWALAQGYFVILNAHHEHWLKENYGNQTYRDRFDAIWQQIAERFKNKSARLMFEILNEPNGMTVADVDDLNPRILDIIRETNPTRLVVFSGNGYTPVDALLAAAIPNDDYLIGNFHSYDPWQFGGQCVRSWGTEQDYTDLENIYKRANTWSEQHDIPVMVNEFGAAHYDFTAPQNVCNQQARLAYLGAHATFAIQYGFGASVWDDGGSFEVYKRGENSWREAKDVLVAPNP

SEQ ID NO: 5 - DNA, 1701 bp, Microbulbifer degradans
atgtttcttttagactttacccgcactgcgtttagctgtacacgaaagcttacctttttgaaatccgcgctacttataagctgctttgccgggcttactgcctgtggtggcgggagtgatggcggtgctgcaagtggctcatcctctagctcgtctagcagcagttcgtctagtagctcttcgagcagttcttcaactagttcctcaagctcctcttcaagctctagttcgtccagttccagctcttcgtctaatagttcctctagctcctctggtggcgatgctttagcgtgccagcatgaaatggcaccagcgctattatctgcaagtgatactaccatggtgcaagcggagtattacgatacctgtgcttcttcggcattagataacaccactggtaacagtggcggtgagttgcgaactgacgatgtagatatagtggccattgcggacggctatgctattacggatatgcagtcaggcgagtacgtagaatattcactaacagtgcaaacttccggtttgtttgacattagttttgcggtacagccgcacgcagctaatactgccggtttggcgctgagtgtagatggcgcagtgttaggcacagttgatattgccgctaatgacagcaccgcatttggcgaatatacgcttaacggcgtgtacataagcgatggcgcgcaagtaataagggtaaccatggccggcgaaggcgctgctattgggttagattccattgcctttaattacaccgataataccgtttacaccccagaaaacgccgtgttgggtatgggaataggtattaacctaggcaataccttagatgccttccccaacgaaggtgactgggcaccggctgcgcaggaatactattttaaagcctacaaggatgcaggtttccgccatgtacgcatcccagcaacttgggatgatcacacggctgatacagccccctacgctgtaaatgcagcacgtatggatcgcactgagcagattgtagattgggccttggcgcagggctatttcgtaattcttaatgcccaccacgaacactggctaaaagaaaactacggcaatcaaacataccgcgatcgctttgatgcaatttggcagcaaattgccgaacgctttaagaataagtcggctcgcttaatgtttgagatactcaatgagccaaacggcatgacagtggccgatgtggatgacctcaacccacgtattctcgatattattcgcgaaaccaatcccacgcgattggtagtgttctctggtaatgggtatacccctgtggatgccttacttgcggctgcaatccctaatgatgattaccttattggtaactttcactcctacgacccttggcagtttggcggtcagtgcgtacgatcgtggggtacagagcaagattacaccgacctagagaacatatataagcgcgcaaatacttggtctgagcagcacgacatacccgttatggtgaacgaatttggcgctgcccattacgattttactgcaccgcagaatgtatgtaaccagcaggctcgtttggcttatttaggtgcccatgccacatttgctattcagtacggctttggcgcaagtgtatgggacgacggtggatcatttgaggtgtacaagcgcggtgaaaatagctggcgcgaagctaaagatgtattagtggcgccaaacccgtag

SEQ ID NO: 6 - protein, 451 aa, Microbulbifer degradans
MRIITAFAVMLLCITGCSGSGASDSPQASNSSSGSSSSSSSSSSSSSSSSSSSSSSTSSSSSSSSSSSSSSSSSSGGEALYPSYNTNPPAPDMTGMTSTATQLADRITVGWNIGNTLEAIGGETNWGNPLVTNELIQAVKASGFDSIRIPAAWDQYANQETAAIDINWLNRVKQVVQYSIDNDMVVVLNIHWDGGWLERNVEPSEQVAVNAKQKAYWEQIATHLRDFDERLIFASANEPHVETEAQMAVLNVYHQTFVDTVRATGGKNAYRVLVLQGPKTDIETTSLLWTQMPQDSAVNKLMAELHFYTPYNFTLMNVDESWGNQFYYWGEGNHSTTDTGRNPTWGEEATVDSLLAITKQQFVDQGIPVIIGEYGAQRRDNLTGDELALHLQSRNYYLKYVTQKCVELGLKPFYWDTGGLDNNQSGLFNRSTYQVFDQNALDAIMEGARGE

SEQ ID NO: 7 - DNA, 1356 bp, Microbulbifer degradans
atgagaataataacggcgtttgcagttatgctgctatgcataacaggctgtagcggatcgggcgcgagtgatagcccgcaagcatccaattcgtcttcgggcagttcttctagctctagcagttcgtcaagttcgagcagttcctctagttcgtcgtctagctcttcaacaagctctagcagctcatctagctccagctcatcatcaagctctagcagttcttcgggcggcgaagcgctttacccaagctacaatacaaacccgccagcgccagatatgaccggcatgacaagtactgccacacaactagcagatcgtataaccgtgggctggaatattggtaacacgctagaggcaataggcggcgaaaccaactggggtaacccgctggttactaacgaattaattcaagcggtaaaagccagtggctttgattccattcgtatacccgccgcgtgggatcaatacgccaaccaagaaacggccgcaatagatataaactggctaaaccgcgttaaacaagttgtgcaatacagcatagataacgacatggtggtagtgctaaacatccactgggatggcggttggctagagcgcaatgtagagcccagcgagcaagtagcagtaaatgcaaaacaaaaagcctattgggaacaaattgccactcacctgcgcgactttgacgagcgcctaatatttgccagcgccaacgaaccccatgtagaaaccgaagcacaaatggccgtactaaacgtataccatcaaacgtttgtagatacagtgcgtgcaactggcggtaaaaatgcttaccgcgtactggtattgcaggggccaaaaacagatatagaaaccacctcgctattgtggacccaaatgccgcaagatagcgccgtaaataaacttatggcagagctacacttctataccccgtacaactttacgttaatgaatgtagatgaaagctggggcaaccagttctactactggggcgaaggtaatcattccactaccgacacaggccgcaacccaacctggggcgaagaagcaacagtagattcactgctggcaattaccaaacaacagtttgtggaccaaggtatacccgtaattattggcgaatacggtgcacaacgccgcgataaccttaccggcgatgaattggccctgcacttacaatcgcgcaactactacttaaaatacgttactcaaaaatgtgtagagctaggcttaaaacctttttattgggataccggcggcttagacaacaatcaatctggcctgtttaatcgcagtacctaccaagtatttgatcaaaatgccctagatgccattatggaaggggccagaggggaataa

SEQ ID NO: 8 - protein, 621 aa, Microbulbifer degradans
MLKHQFSKALRALGFGGAVFAASLMASQASALECEHSISNDWGAGFTGAMKVTNNDSSPITGWRVEWAYSGNVNIVNSWNASVTKGSNYVAVDAGWNGNLQPSQSTEFGLQGDGADRNVTIISCVAEGGSSSSSSSSSSSSSSSSSSSSTSSSSSSSSSTSSSSSSTSSSSSSTSSSSSSSSSSSSSGGNCVAMCNWYGENRPVCANQNTGWGWENNQSCIGANTCNDQWGDGGVVSSCGTSSSSSSSSSSSSTSSSSSSSSSTSSTSSSSSSSSSSGGLSAVEFSQQMGLGWNLGNSLEAIGGETAWGNPMVTQQLINSIKAAGFDTIRIPVAWSQFSDEANFVINSNWIARVEEVVNYALSADMYVVMNQHWDGGWMQPTYAQQEYVNNRLQIMWTQIANHFKDYDSRLLFAGTNEVMVEGDYGTPTFEYYTVQNSFNQTFVDAVRATGGANASRYLVVQGFNTNIDHTVNFAVVPTDPATNRLMMEVHYYDPYNFTLNTNSNITQWGVIATDPSVTETWANESYVDATFQKMKTNFVDQGIAVILGEYGVVSRANVAGHETYREYWNQYITQSAVDHGMVPIYWDNGYSGDGGMALFDRASGNQLYPNIINAIINAGN

SEQ ID NO: 9 - protein, 85 aa, Microbulbifer degradans
MLEEELEVELEEELVEELELLDEEVLELDEELLEELEELDELEDDPPSATQLIMVTFLSAPSPCKPNSVDWLGCKLPFHPASTAT

SEQ ID NO: 10 - DNA, 1866 bp, Microbulbifer degradans
atgttgaaacatcaattcagcaaagcgctgcgtgcgctaggctttggtggggctgtgtttgcggcatcgctaatggctagccaagcaagtgcccttgagtgtgagcattcaatcagtaatgattggggcgccggctttaccggtgcaatgaaagttaccaataatgactctagccccattaccggttggcgggtcgaatgggcgtatagcggcaatgtaaatattgttaattcgtggaacgcctcagtaacaaaaggcagtaattatgttgccgtagatgccggatggaatggtaatttacagccgagccaatctaccgaatttggcttacagggtgatggcgccgatagaaatgtaaccattattagttgtgttgccgaaggcggatcatcttctagttcatcaagttcttccagctcctcaagtagttcttcatctagctcaagtacttcttcatcgagtagctcaagttcctcgacgagctcttcttctagttcgacttctagctcttcttcaagcacctcttctagctcatcgtccagttcatcaagctcttcttcgggcggcaactgtgttgcaatgtgtaattggtacggtgaaaaccgccctgtttgtgccaatcaaaatactggttgggggtgggaaaacaaccaaagctgtataggtgcaaacacctgtaacgatcaatggggcgacgggggcgtggtgtccagctgtggtacgtctagctcttcatccagttcttcgtccagttcgtctaccagttcatcctcgtcttctagctcgagcaccagctctacaagcagctcatcaagctctagttcgtcgtctggtgggttaagcgcggtagagttttcgcagcaaatgggcttggggtggaatcttggaaactccctagaagcgattggtggcgaaaccgcgtggggcaacccaatggttacgcagcaattaattaactccataaaagctgctgggttcgacactattcgcattccggttgcgtggagccaattctcggacgaagctaattttgttatcaatagcaattggattgcacgcgtagaagaagtagtgaactacgcattgagcgccgatatgtacgtggtaatgaaccaacattgggacggcggttggatgcagcccacatatgcacagcaagaatatgttaacaatcgcttgcaaattatgtggacgcaaatagctaatcactttaaagattacgatagtcgcttactgtttgcaggcaccaacgaagtgatggtggaaggcgattacggtacgcccaccttcgaatactacacagtacaaaatagctttaaccaaacgtttgtggatgctgtacgtgcaaccggtggcgctaatgctagccgttacttagtggtacaggggtttaataccaacatagatcacacggtgaacttcgcggtagtgccaaccgacccggcaacaaacaggttaatgatggaagtacactattacgacccctataactttacgttaaataccaacagcaacattactcagtggggcgtaattgcaactgaccctagcgttaccgaaacatgggcgaatgaatcttatgtggatgcgactttccaaaaaatgaaaactaacttcgttgatcaaggtatagcggtaattttaggtgagtacggggttgtatcgcgcgcgaatgtggccgggcacgaaacttaccgagagtattggaaccaatacattactcaatctgcggtagatcatggaatggtgcctatttattgggataacggttattccggtgatggtggtatggcattgtttgatcgcgccagtggcaatcaactttaccccaatattattaacgcaattatcaatgccggtaactaa

SEQ ID NO: 11 - protein, 673 aa, Microbulbifer degradans
MLIGTVTASALVGRGRGTPKKIINKGSIMWQINKSALAAVVLVCSSSSFAQSACDTQRIEAENYVAMSGIQTESTADTGGGLNVGWIDAGDWLSYQVNLPAAGQYEVRYRVASRNGGGVLRLEGNAGQTLYGTMNVPNTGGWQNWQTLSHSVTLAAGEQSIGIGVPSGGFNINWLEFVPLDCSGPIDPPINPPSNCASIVFEAENYDQMSGIRTQTTSDTGGGLNVGWIDAGDWLSYATVNIPSTQVYNFEYRVASPNGGSFNLQGSAGAENFDTATLPNTGGWQNWTTVTGSALLPAGNVNFGISAITGGWNINWFKATPESCDDINPPSTGITAKQAAAAMGKGFNLGQMFESTQHPRTFNAAKSKIDAYYNMGYRNVRIPITWTEAVGGNRLVADANVGAVNRNHSRLAVITQVVDYALSLPGMYVVINAHHEGGLKTNNRWWVLETLWADIADIFKDRDHRLLFEILNEPHLSDANKSPMPPANLRFMTGKAYNKIRAIDAQRIVIIGGNQWFGAGEMANVWPNLNDVGGGSDAYVMATFHHYDPWSFSGDNQGDYADAWTLSNVGNPMDIMQSWANGVGQGMPVYIGEWGVGWGSRYSAMQCNNIRYWYQLFDASYASAKGQPTAVWDDGGWFKIFDHGTNSFNNNLAQCIGGNCAWDGADRFNSGCN

SEQ ID NO: 12 - DNA, 2022 bp, Microbulbifer degradans
atgttgattggtactgttacggcttcagcactggttggtcgaggccgtggcacccctaaaaaaataatcaacaagggttctattatgtggcaaatcaacaaatcggctttagcggccgtggtattagtgtgttcctcatctagctttgcgcaatctgcatgtgacactcaacgcattgaagccgaaaattacgtggcaatgagtggtattcaaaccgaaagcacggcagacactggtggcggtttaaatgtgggctggatagacgccggcgactggcttagttaccaagttaacctacctgctgcagggcagtacgaggtgcgctatcgcgttgccagtagaaatggcggcggtgtacttcggttagagggcaatgccggtcaaaccttgtatggaactatgaatgtacccaacacgggtggctggcaaaattggcaaaccctttctcattcagtgacattagcggcaggagagcagtctattggtattggtgtgccaagcggcgggtttaatattaattggctggagttcgtacctttagattgcagtgggccaatcgacccgcccattaacccaccttcgaactgcgcgagcattgtattcgaggccgaaaattacgatcaaatgagcggcattagaacgcaaaccacaagtgataccggaggcggcttaaatgtggggtggatagatgctggcgactggcttagctatgccactgtgaatatccccagcacgcaggtgtacaattttgaataccgtgtggctagccctaatggcggcagttttaatttgcagggttcggctggcgcagagaattttgataccgctactttgcccaatacgggtggttggcaaaattggacaacggtaacaggctcggcgcttttacctgctggcaatgtgaatttcggtattagtgcgattactggtggctggaatataaactggtttaaagctacaccagagagctgtgatgatataaaccctccaagtaccggtattactgctaagcaagcagcggcagccatgggcaaggggtttaatttggggcaaatgttcgaaagtacgcaacacccaagaacatttaatgctgcaaaaagtaaaatagatgcttactacaatatgggctacagaaatgtgcgcatccctattacttggactgaagccgtaggcggaaacaggcttgttgcagatgcaaatgtaggcgcagtcaatcgcaaccactctcgcttagctgtaattactcaagtagtagattacgcgctttcgctacccggcatgtacgtggttattaatgcgcatcacgaaggtggattaaaaaccaataatcgctggtgggtgttagaaactctgtgggcagatattgccgatatatttaaagacagagatcaccgtttgctatttgaaatattaaacgagccacacctaagcgatgccaataagtcgcctatgccccccgccaatttgcgttttatgacgggcaaagcctataacaaaattcgcgcgatagatgcgcagcgaatcgttattattggtggcaaccagtggtttggtgcaggtgaaatggcaaacgtatggccaaaccttaatgatgttggcggcggttccgatgcatatgtaatggctacttttcaccattacgacccgtggtcgtttagtggcgataaccaaggcgattacgccgatgcttggacgctatctaacgtgggtaacccaatggatataatgcaaagctgggcaaacggcgtaggccaaggtatgcctgtgtatattggcgagtggggcgtaggttggggcagccgctacagcgccatgcagtgcaataatattcgctattggtaccagctgttcgacgcgagctatgcctcggcaaaaggccagcctacggcagtgtgggatgacggcggttggtttaaaatattcgaccacggtaccaacagcttcaataataatttagcccaatgtattggtggaaactgcgcttgggatggcgccgatagatttaattctggctgtaattaa

SEQ ID NO: 13 - protein, 365 aa, Microbulbifer degradans
MRTTKFLALALCLLASASALSANNSAPSNDWWDIPYPSQFDVKSLKTQSFISVKGNKFIDDKGKTFTFRGVNIADTGKLLSQNQWQKSLFEELANNWGVNTIRLPIHPVSWRKLGPDVYLGHIDEAVRWANDLGIYLILDWHSIGYLPTEQYQHPMYDTTIKETRDFWRRITFRYKNVPTVAVYELFNEPTTMGNTLGERNWAEWKTLNESLIDMIYASDKTVIPLVAGFNWAYDLSPIKKAPIEREGIAYAAHPYPQKAKPEVKNDKNFFKLWDEKWGFAADTYPVIATELGWVQPDGYGAHIPVKDDGSYGPRIVKYMQKKGVSYTVWVFDPDWSPTMINDWDFTPSEQGAFFKQVMLEAKKR

SEQ ID NO: 14 - DNA, 1098 bp, Microbulbifer degradans
atgcgcacaaccaaatttcttgcgcttgcactctgcttgctggcctcagccagtgcactgagtgcaaataacagcgccccatcaaacgactggtgggatataccctacccgagccaattcgatgtaaaaagccttaaaacgcaaagttttatatcggtaaaaggtaacaagttcattgatgataagggcaaaaccttcacttttagaggggtaaacattgccgatacaggtaagctacttagccaaaatcaatggcaaaaatcgctgtttgaagagctggctaataactggggggtaaatactattcgcctgcctattcaccctgtaagttggcgtaaacttgggccagacgtttatttaggccacatcgatgaggcggtacgctgggcgaatgatttaggtatttaccttattcttgattggcactccattggctatttgcccaccgagcaataccaacaccccatgtacgacaccaccattaaagaaacccgcgacttttggcgcagaattacgttccgctacaaaaacgtgcccaccgtagcggtatacgaattatttaatgagccaaccaccatgggtaacaccctaggcgaacgcaactgggccgagtggaaaaccttaaatgaaagcctaattgatatgatatatgccagtgacaaaaccgtcattccgctggttgcaggcttcaactgggcctatgatttatcgccaatcaaaaaggcacctatcgagcgtgaaggcattgcttacgccgcacacccctacccgcaaaaggcgaaaccagaggttaagaacgataaaaacttcttcaaactgtgggacgaaaagtggggctttgctgcagacacctaccctgtaatagcaacagagctaggctgggtacaacccgatggttatggtgcccacatacccgttaaagacgacggcagttacggcccccgcatagtgaagtatatgcagaaaaaaggcgtttcttacacggtatgggtattcgaccccgactggagcccaacaatgattaacgactgggattttacccccagcgagcaaggcgcgttttttaaacaggttatgctagaagctaaaaaacgctaa

SEQ ID NO: 15 - protein, 638 aa, Microbulbifer degradans
MTFTRMKSSHQGACRPRSSTLQRLIASSLTTACLLAASTFADVAPLTVDGNRILSGGQEASFAGNSLFWSNNYWGGEKYYTAETVNWLKQDWGATLVRAAMGVEDNGGYLDDKEGNKQKVKTVVDAAIANDMYVIIDWHSHHAEDHKSEAIAFFEDMARTYGNKKHVIYEIYNEPLQISWSNTIKPYAEDVIRAIRAIDPDNLIIVGTPTWSQDVDVASQDPITGYANIAYTLHFYAGTHKQSLRDKAQTALNNGIALFATEWGTVNANGDGAVNTTETDKWMTFFKTNHISHANWALNDKSEGASALNPGASPNGNWSNADLTTSGKYVKNIIKNWNDGTPGGSSSSSSGGSTSSSSSSSSSNSSSGAGKVNLPARIEAENYNSAPVETTAGNSGGSVSQCTYRGLNVDVQDASEGTCNIGWTAAGEKVTYNIGTANNTYNIALRTASLDAGKRVSVYVGNTLADTISTQGGGWQNWKTQTIPNVYIPSNSVITVEFYDGRTNLNYLNISAASGSSSSSSSSSSSTSSSSSSSSSSSSGGGSCSSYIDIPWNTRTEVTLTSGACVRFNQNLSGKTLQVWDSDANSSCDFRGTVTTVGGTGSLNVSSNYVSSKSLTGTKLTFNSASNNNCKYVKVRAY

SEQ ID NO: 16 - DNA, 1917 bp, Microbulbifer degradans
atgactttcacaagaatgaaatcatcacaccaaggcgcgtgtcgaccaaggtcttccaccctacagcgactaatcgcctcatcacttaccaccgcatgtttgctagcagcgtctacttttgccgacgtagcgccgttaaccgtagatggcaaccgcattctcagcggtggccaagaggctagctttgccggtaacagtttgttttggagcaacaattattggggcggtgagaaatactacacagccgaaactgttaactggttaaaacaagactggggcgcaacactagtgcgcgcggccatgggtgtagaagataacggcggctacctagatgacaaagaaggcaacaaacaaaaggtaaaaaccgttgtagatgctgctattgccaacgacatgtatgtaattatcgattggcacagccaccacgccgaagaccacaaaagtgaagccattgctttttttgaggatatggcgcgcacctacggcaataaaaaacacgttatttacgaaatttataacgagcctttacaaatttcgtggagcaacacaattaaaccctacgccgaagatgtaattagagctattcgcgcgatagaccccgacaacttaattattgttggtacgccaacgtggtcgcaagatgtagacgtagcatcgcaagaccccattaccggctacgccaatattgcctacacattgcacttttacgcaggcacccacaaacaatctttacgagacaaagcgcaaaccgcacttaacaacggcatagcgcttttcgcaacagagtggggaacagtaaatgcaaacggtgatggcgctgtaaacaccaccgaaacagacaagtggatgacgttctttaaaaccaaccacataagccacgcaaactgggcgctaaacgacaaatcagaaggcgcttctgcattaaaccccggagccagccccaatggcaactggagcaacgccgacttaaccacatcgggtaagtacgtaaaaaacattatcaaaaactggaacgacggcacgccgggaggcagctcttcaagctcgtccggcggctcaaccagttcctcctcaagctcatctagctctaattccagctctggtgctggcaaagtaaatttacccgcacgcattgaagccgaaaactataacagtgcaccggtagaaacaactgcaggcaatagtggcggcagcgtttcacaatgtacatacagagggctaaatgtagacgtacaagacgcaagcgaaggcacttgtaatattggctggacagcagcaggcgaaaaagttacctacaacataggcacagcaaataatacttacaatattgcacttcgcaccgcatcgcttgatgcaggcaagcgcgtatcggtatatgtaggcaacaccctcgccgacacaataagcacccaaggtggcggctggcaaaattggaagacgcaaaccatccccaatgtatatattccatcaaactcagttattaccgtggaattctacgatggccgcaccaaccttaactacttaaacattagtgcagcttcggggtcttcctcttcaagctcctcatctagctcgtcaacgtctagctcttcttcgagctcatcttctagctcttcaggtggtggcagttgtagcagctatatagatataccttggaatactcgcaccgaagttaccctaacaagtggcgcctgcgttcgctttaaccaaaacctttcgggcaaaaccctacaagtgtgggatagcgatgcaaactcatcgtgcgatttccggggcacagttacaacagtaggcggcactggcagtttaaatgtaagcagcaactatgtttcgtctaagagcctaacaggaaccaaacttacatttaattcagcaagtaataacaattgtaagtacgttaaagttcgtgcttattag

SEQ ID NO: 17 - protein, 630 aa, Microbulbifer degradans
MKSATTNQSRARSSAFKNMLAASLAGLGLLSASAFADVAPLTVDGNKILSGGQQASFAGNSLFWSNNGWGGEKYYTAGTVEWLKQDWGSNLVRAAMGVDENGGYLEDPAGNKAKVTTVVDAAIANDMYVIIDWHSHHAEDYQNQAISFFQDMARTYGNNNNVIYEIYNEPLQVSWSGTIKPYAEAVIGAIRAIDPDNLIIVGTPTWSQDVDVASRDPITQYSNIAYTIHFYAGTHKQSLRDKAQTALNNGIALFATEWGTVNANGDGGVDAAETDRWMQFFKANHISHANWALNDKAEGSSALKPGSNANGGWSNSDLTASGTYVKNLIKTWNDGSPSSSSSSSTSSSSSSSSSSSSSSSSSSSSSSGGTNLPARIEAENYDSAPVETTAGNSGSPTNCSYKGMGVDVENSTEGACNIGWTAAGEKVTYNIGNADGTYDIALRVASMDAGKRISVHVNNSLADTVTTQGGGWQAWTTETISNVYIPSNSVITVEFYDSGSNLNFLNITESSGTEPPVEPPVEPPVEPPVDNGNFPCNDGNSTLANNGASINLNQGACVKYNHGWGDIRLGTWSGNGTIRYDVLDCNNNVMSDIAQKLNDFTAVDTATMNCAHYIYVKQAPSSYTLQFGSW

SEQ ID NO: 18 - DNA, 1893 bp, Microbulbifer degradans
atgaaatcagcaaccacaaatcaatcgagggcacgcagtagcgcctttaaaaatatgttggcggcatcgctcgcaggtttagggctactatcagcttctgcatttgccgatgtagccccgctaaccgtagacggcaataaaattcttagcggtggccagcaagccagttttgccggtaatagcttattttggtctaacaatggctggggcggtgagaagtattacacggccggtaccgttgaatggctaaagcaagactggggcagtaatttagttcgcgccgcaatgggtgtcgatgaaaacggcggctacttagaagacccagcaggaaacaaagcgaaagtaacaaccgttgtagatgcagccatcgctaacgatatgtatgtaattatcgattggcacagccaccacgccgaagactaccaaaaccaagccattagctttttccaagatatggctcgcacctacggtaacaacaacaacgttatatacgaaatttataacgagccattacaggtttcttggagcggcaccatcaagccttacgcagaagcggtaattggcgcaattcgcgcaatcgacccagataaccttattattgtgggcacgcctacttggtcgcaggatgtagacgtagcctcgcgcgaccccatcacgcagtacagcaacattgcctacactattcacttttatgcgggcacccacaaacaatccctacgcgataaagcacaaaccgcattaaataatggtattgctttgtttgctaccgaatggggtacagtaaatgccaacggtgacggcggtgtagacgcagccgaaactgatcgttggatgcagttttttaaagcgaatcatataagccatgccaactgggccttaaacgataaagccgaaggctcttctgcattaaagcctggctctaacgcaaacggcggctggagcaattccgacttaaccgcctctggtacctatgttaaaaacttaattaaaacatggaacgacggctcaccgagcagcagctcatctagcagcaccagttcttcttcaagcagctcctcgtctagtagctcatcatctagcagctcttcatctagtagttctggcggtaccaatttacccgcgcgcattgaagcagaaaactacgatagcgcaccggtagaaaccactgcaggtaatagcggctcacccaccaattgttcgtataaaggtatgggcgtagatgtagaaaactctactgaaggtgcttgtaatattggctggactgcggcaggcgaaaaagtaacttacaacattggcaatgccgatggcacttacgatattgcattgcgcgtagcctctatggatgcgggcaaacgtatctctgtgcatgtaaacaacagcctagcagataccgtaaccacacaaggtggcggctggcaggcatggactaccgaaaccatttctaacgtgtatatcccatcaaactcggtaattaccgttgagttttacgatagtggctctaacctaaactttttaaacattaccgaaagctcgggtaccgaaccacctgtagaaccacccgttgagccgccagtagaaccacccgtagacaacggtaacttcccatgtaacgacggtaactctacgcttgccaacaacggcgcctccattaaccttaaccaaggagcgtgtgttaaatacaatcacggctggggcgatattcgtttaggcacctggagcggcaacggtaccattcgatacgacgtactagactgcaataacaacgtaatgagtgatattgcacaaaaacttaatgactttactgctgtagacaccgcaacaatgaactgcgcacactacatttatgtaaaacaagcccctagcagctacaccctgcaatttggtagctggtag

SEQ ID NO: 19 - protein, 725 aa, Microbulbifer degradans
MKINTLFTPLRTVGAAVAIALSPVAFADVTCEVTNFNQWNSGYQADVRVTNSGSAVSGWTVNLNFASAPQMTNGWNAALSTSGNTISASNISWNGNLGNGQSTSFGFQGNSNGNLATPTCVGSGTGSSSSSSSSSTSSTSSSSTSSSSTSSTSSSSSSSGGECVEMCKWYQDAPRPLCNNQDSGWGWENNQSCIGRTTCNSQSGNGGVINSCPSSSSSSSSSSTSSTSSSSTSSTSSSSTSSTSSTSSSSTSSTSSSSTSSTSSSSSSGGGVFRVDATGNITKNGEVLPVRCGNWFGLEGQHEPSDAQNNPGGAPLELYVGNMWWVDSGRTIQQTMSEITAQGINMVRLPIAPQTLNPNDPQGVGDVRNGGVLKNHESVQQTNARQALEDFIVQANENDIQVLIDIHSCSNYVGWRAGRLDAEPPYVDATRVGYDFTREDYSCGTNVGPGVTVHEYNEEIWLNNLREIAGLSESLGVDNIIGIDIFNEPWDYTWEEWKALSESAYQAISEVNPDILIFVEGVAGGTGAGVDVPHGDESSNPNWGENFYPAQTAPLNIPKDRLVISPHTYGPSVFVQRQFMDPNDPECVGLEGDEAAEAGCQIVIDYATLAAGWDEHFGFLREQGFAMVVGEFGGNMDWPNGTRQAEKDMWSHITPGIDRQWQEAFVDYMVEKNIQACYWSINPESGDTGGWYGHEYDPVSNDAGWGRWLDFDSRKTNLLKELWGI

SEQ ID NO: 20 - protein, 71 aa, Microbulbifer degradans
MLEVELLLVELVELDEVLEVLLVELDEVLEVLDELVDEVLEELEELEELGQLLITPPLPDWLLQVVRPIQL

SEQ ID NO: 21 - DNA, 2178 bp, Microbulbifer degradans
atgaaaatcaacactctctttacgcctttgcgtactgtgggtgctgcagttgcgatagctttatcgcctgtagcctttgcagacgtaacgtgcgaagtaacgaactttaaccagtggaatagtggctaccaagccgatgttcgtgttacaaacagcggtagcgctgttagtggctggaccgtaaatttaaattttgcctcagccccgcaaatgacaaatggctggaacgcagctttgagtactagcggcaatacaattagtgcatctaatattagttggaatggcaatttgggtaatggtcagtccaccagctttggttttcagggcaattcaaatggtaacttggcaacgccaacgtgtgtaggtagcggtacggggtcttctagcagctcttcatccagctctacttctagcacaagctcatcatctacaagttcttctagcacgtcttctactagctctagcagttcatcctctggtggtgaatgtgtagaaatgtgtaagtggtatcaagatgcaccgcgcccattatgtaataatcaagacagtggttggggttgggaaaacaatcaaagctgtattggtcgcactacttgtaacagccaatctggcaatggtggtgtaattaatagttgcccaagttcttcaagttcttcaagttcttctagcacttcgtctaccagctcatctagtacttcaagtacttcatcgagctcaacaagtagtacttcaagcacttcatcaagttccacaagctctactagcagcagctcaacctctagcactagctcgtcgtcttcaagtggtggtggagtattccgcgtagatgctaccggtaatattactaaaaatggtgaagtactgcctgttcgttgtggtaactggtttggtctagagggccagcacgagccttcagatgcgcaaaataacccaggcggtgcgccgcttgaattatatgttggcaacatgtggtgggtagatagtggccgcactattcagcaaaccatgagcgaaattaccgcccaaggtatcaacatggttcgcttgcctattgcaccgcaaacattaaaccctaacgaccctcaaggtgtgggtgatgtgcgcaacggcggcgtgcttaaaaatcacgaatctgtgcagcaaaccaatgcacgtcaagcgttagaagacttcattgttcaagctaacgaaaatgacattcaagtgctaattgatattcactcttgtagtaactacgtgggttggcgtgcaggccgtttagatgcagagcctccttatgtggatgcaacgcgagtgggttatgactttacccgtgaagattattcttgtggcaccaatgtgggcccaggtgtaactgtgcacgagtacaacgaggaaatttggttaaacaacttgcgtgagattgctggtttatctgaatccttgggcgttgataatattatcggtatcgatatttttaacgaaccatgggattacacttgggaagagtggaaagcactttctgaaagcgcttatcaagccattagcgaagttaacccagatattctaatctttgttgagggtgttgcaggcggcacgggtgctggtgttgatgtgccacatggagacgagtcttctaaccctaactggggcgaaaacttttatcctgcgcaaactgctccgcttaatattccaaaagatcgtctagttatttcaccgcatacctatggcccatctgtatttgttcagcgtcaatttatggacccgaatgatccagagtgtgttggtttagaaggtgatgaggcggctgaagctggctgtcaaattgttatcgattatgcaaccttagcagctggttgggatgagcatttcggcttcttacgtgagcaaggctttgccatggtagtgggtgagtttggtggcaacatggattggccaaatggcacgcgccaagcagaaaaagatatgtggagccacatcacccctggaatcgacagacagtggcaagaagcgtttgttgactacatggttgagaaaaacatccaagcttgttactggtcaattaacccagagtctggcgacactggcggttggtatggtcacgagtacgaccctgtttctaacgatgcaggttgggggcgttggttagacttcgattctcgcaaaactaacttacttaaagagctttggggtatttaa

SEQ ID NO: 22 - protein, 610 aa, Microbulbifer degradans
MMYTNLFNLKKHLFQTSLKLLACATLIGGTLNAAADVPAMSVQGNKVLVGGEVKSLGGMSYFWSNNGWGGEKYYNASTVSYFKQDWKASIVRAAMGVEDAGGYFDDPQGSKQKVRTIVDAAIANDMYVIIDWHSHYANTHDWAAAVQFFQEMARDYGQYNNVIYEVYNEPLDIPWGHIKSYAETVIDAIRAIDPDNVIVVGTPRWSQGVKEASWDPINRNNIAYTLHFYSGSHGQWLRNDAAEAMSNGIALFVTEWGSVNANGDGAVNEGETAAWMNFMRDNGIHHANWSVNDKAEGASALNPGASATGGWGDGDLTWSGHVVRGYLRDWNQIGSGNGNGNGTGCTEVSLPGTIEAEAYCAMDGIQTENTNDTNGGSNVGYIDAGDWMSYSVNVANAGTYTVSYRVASLGGGGVLSIENAGGSPVYGTLNVPQTGGWQEWTTVSHDISLQAGQQNIGIAAIEGGFNINWIALTPAGTNPNPVQSITLQAEDYSFMSGVQVENTSDNGGGMNVGWLDAGDWLAYHGVNIPTSGQYTITYRVASQSGGGSLQLEQAGGGVVYGNLNVPSTGGWQNWVDVSHTVTLNAGVQDFGLGITSGGFNINWIKVEAIH

SEQ ID NO: 23 - DNA, 1833 bp, Microbulbifer degradans
atgatgtacacaaacctctttaatttaaaaaagcacctctttcaaacctcacttaaactactggcctgcgccacattaattggcggcaccctaaacgcagccgctgacgtgccagcaatgtccgtacaaggcaataaagtactggtgggcggtgaagttaaaagccttggaggtatgagctatttttggtctaacaacggctggggcggcgagaaatactacaacgcttctaccgttagttacttcaagcaagactggaaggcatccattgttcgagctgcaatgggggtagaagatgccggcggctacttcgatgacccgcagggctctaagcaaaaagttcgtacaatagtagatgccgccattgcgaatgatatgtacgtcattatcgattggcactcacattacgccaacacccacgactgggcagccgctgtgcaatttttccaagaaatggcacgtgactatggccaatacaataatgtgatttatgaggtatacaacgaaccactggatatcccttggggccacataaaaagctacgccgaaacggtaattgatgccattcgcgcaattgacccagataacgtgatcgtagtaggcactcctcgctggtcgcagggggtaaaagaagcgtcatgggacccaatcaaccgcaataatattgcctacacgctgcacttctattcaggtagtcatggccaatggctgcgcaacgacgcagcagaagctatgagtaatggtattgccttgtttgttactgaatggggcagcgtaaatgccaatggcgatggcgcagtcaacgaaggcgaaaccgcagcgtggatgaacttcatgcgcgataacggtatccatcacgcaaactggtctgtaaacgacaaagcagagggtgcatctgcacttaaccctggcgccagtgccacaggtggttggggcgacggcgatttgacttggtctggccatgttgtgcgcggctacctgcgcgactggaaccaaattggttctggcaatggtaacggcaacggcacaggctgcaccgaggttagcctaccaggcacgatagaagcggaagcctactgcgcaatggatggtatccaaaccgaaaacaccaacgacaccaacggcggcagtaacgtgggctacatagatgctggcgactggatgagctacagcgtaaacgttgctaacgcaggcacttataccgtgtcttaccgcgtggctagccttggcggcggcggtgttctaagcattgaaaatgccggcggctcgcccgtttatggcacgctgaatgtaccgcaaactggcggctggcaagaatggaccactgtatctcacgatattagcttgcaagccggccaacaaaacattggcatagcggcaatagaaggtggttttaacatcaactggatagccctaacccctgctggcaccaaccccaacccagtgcaaagtattaccttacaagcagaagactactcctttatgagtggcgtgcaggtagaaaatactagcgacaatggcggcggtatgaacgtaggctggttagatgctggcgactggcttgcctaccacggcgtaaacattccaacctctggccaatacaccataacttaccgagtagccagccaaagcggtggtggaagcctgcagctagaacaagcaggtggcggcgttgtttacggtaacctgaacgtaccaagcactggcggctggcagaactgggtagacgtaagccataccgttacccttaacgctggtgtacaagattttgggttaggtattactagtggtggcttcaatattaactggataaaagtcgaggcaattcactaa

SEQ ID NO: 24 - protein, 791 aa, Microbulbifer degradans
MLASNKNSKLANSEQHRPYKTRTARWLTGSGVIASSLLFSAQSFAAQCEYIISNEWNSGFTGAVRITNNGTTPINGWDVSWQYAGDAVTSSWNANVSGSNPVSATPLSWNANIQPGQSVEFGFQGSKAGSNAEIPTVTGAVCDSGSSSSSSSSSSSSSSSSSSSSSTSSSSSSSSSTSSSSSSSGSSGTGGIACTVGNANIWGSGYQLDMQVVNNGTAAVSSWDVTMAFGEAPQRTGGWNANFVESGNTIVASNISWNGNLAPGQSASFGIQGNHDGSFGGVTCNGASSSGSSSSGSSTSSSSSSSSSSGSSTSSSSSSSSTGSTSSSSSSSTSSTSSSSSSSTSSTSSSSSSSSSTSSSSSSSSSSSSSSTSGSGAGFDNPFIGGKWYVDPVWSAKAAAEPNGSLIANYNTAVWMDRIGAIEGPEDGDGMGLEEHLDEALAQGADIFMFVVYDLPNRDCAALASSGELLIAENGFERYQNEYIGPIVDILSKPAYSSLRIIAIIEVDSLPNLVTNLNIQKCVEANGPGGYVDGIQHALNELNTLDNVYPYVDIAHSGWLGWSDNFAGATKLIGDAIKGTNKGVNSIAGFVSNSSNYTPVTEPYLPNPTLQIGSNQVRSADFYEWTMYFEELSFVQDWRQAMIQQGFPESIGMLIDTARNGWGGPDRPTGESTSTDLNTYVNESRIDRRQHRGNWCNQPGGVGFRPQAAPEPGVDAYVWVKPQGESDGISDPNFPIDPNDPAKQHDPMCDPNAPNRDNNAVGTGALDNAPHAGRWFPEAFQILIENAYPPL

SEQ ID NO: 25 - protein, 65 aa, Microbulbifer degradans
MPLEPDDELDEEVLEELDEELLVLLELLEELDELDDELELEELEPLSHTAPVTVGISALEPALLP

SEQ ID NO: 26 - protein, 112 aa, Microbulbifer degradans
MNGLSKPAPLPEVEELELEEDELELDDVLELELELELVELVLELELEEVLEVEELLELEVEPVEELELELEVLEPDELDELLDELVLEPELDEPELEAPLQVTPPKEPSWFP

SEQ ID NO: 27 - DNA, 2376 bp, Microbulbifer degradans
atgttggcttctaataaaaatagtaagctggcaaactctgagcaacaccgcccttataaaacccgcacagcgcgctggttaaccgggtctggggttattgcttcaagtttgcttttttctgcgcagagttttgcggcgcaatgtgaatacatcattagcaatgaatggaacagcggctttactggcgcagttcgcattactaataatggcactactcccatcaatggctgggatgttagctggcagtatgccggcgatgcagtcaccagcagctggaacgcgaatgtttctggctcgaaccccgtttctgctacaccattaagctggaatgccaacattcaacccggtcaaagcgttgagtttggttttcagggcagcaaagccggctccaatgcagaaattccaaccgttaccggcgcggtatgtgatagcggctctagctcttccagctccagctcatcatctagttcatcaagctcttctagtagctcaagcagcactagcagctcctcgtccagctcttcaagcacctcttcgtctagctcatcatctggctccagtggcacaggtggtattgcgtgtactgtaggcaatgcgaatatttggggctcgggctaccagctggacatgcaagttgttaacaacggcaccgctgcagtaagcagttgggacgtaaccatggcattcggcgaggcaccacagcgcaccggtggctggaacgcaaactttgtagagtcaggcaataccattgttgcgagcaacattagctggaacggcaacctcgcaccggggcaatcagcttcgtttggtattcaagggaaccacgacggctcttttggcggcgtaacctgtaacggcgcttcaagctctggctcgtctagttctggctctagcaccagctcatcaagtagctcatccagttcgtctggctctagcacttctagctctagctcaagctcctctactggttctacctctagctctagtagctcttcaacttctagcacttcttcaagttctagctctagcaccagctccacgagttctagctccagttctagctcgagtacatcgtctagttccagctcatcttcctcaagctctagctcttctacttcaggcagtggcgcaggttttgacaacccgttcattggcggcaagtggtatgtagacccagtatggtcagcaaaagctgcagcagagccaaacggttcacttattgccaactacaacacggcagtttggatggatcgcattggtgcgattgaaggcccagaagatggcgatggtatgggcttagaagaacacttagatgaagctttagcacaaggtgcagacatctttatgttcgtggtatacgacctaccaaaccgcgactgtgcagctttggcctcaagtggcgaactactcattgccgagaacggttttgagcgctatcaaaatgagtacattggcccaatcgtagatatactcagcaagcccgcgtattctagcttgcgtattatcgcgattattgaagtggattctctacccaacctcgttaccaacctcaacattcaaaaatgtgttgaagcgaatggcccgggtgggtacgtagacggtatccaacatgcacttaacgagctaaacacgcttgataatgtgtacccatacgtcgatattgctcactcaggctggctaggctggagcgacaacttcgccggcgccaccaagcttattggtgatgcaattaaaggcacaaacaaaggtgtaaacagtattgcaggctttgtaagtaactcttctaactacacacctgtgactgaaccatacctacctaaccctaccttgcaaattggtagcaaccaagttcgatctgcggatttctacgagtggaccatgtacttcgaagaacttagctttgtacaagattggcgccaagccatgattcagcaaggcttcccagaatcaattggtatgcttattgataccgcacgtaatggctggggtggacctgaccgtccaactggtgagtctacatctaccgacctcaacacctatgtgaatgaatcgcgtatagaccgccgtcagcatcgcggaaactggtgtaaccagcccggtggtgttggcttccgtccgcaagcggcaccagaaccaggtgtagacgcttacgtttgggttaagccacaaggtgagtcggatggtattagtgatcctaacttccctatcgaccctaacgacccagctaaacagcacgacccaatgtgtgatccaaacgcacctaaccgcgataacaatgcggttggcacaggcgcgctagataacgctccacatgctggtcgctggttcccagaagcattccaaatacttatagaaaacgcctacccaccgctatag

SEQ ID NO: 28 - protein, 578 aa, Microbulbifer degradans
MNKVKVLALCASVAVMIGCSDADTKLANSAKAEVGFTKVNQLGYLPAAKKLAVVPAVAAAKFDIIDVTSGKVAFTGSLSDVKSWSAMGDESFKLADFSALQAEGSYRLVVQGVSDSYTFDISPSVYSQAHDGALKAYYYNRASTELTEQYAGVYARPAGHPDTDVRIFDNAASAARPADTSFAAPKGWYDAGDYGKYIVNSGISTYTLMAAYEHFPSFYKQRDIDIPESGDAVPDILDEVMWNLEWMQVMQDPNDGGVYHKLTTLNFSGAVMPHEATAQRYFIKKSTAATLDFAAVMATASRVYAPFEGAFPGKSAAYRQAAIAAWEWAQANPSETYSQTPLSKVQTGAYGDKKLNDEFAWAAAELFILTGEQKYWQAFNKQKVQAGESSWANVAGLGFISLANNARSLLNEAQYKTVTDSIVRAADSLLVTYKENAYQVPIGNKDFFWGGNSGTLNRAWVLLEANKIKPQQEYIDAALAAVDYIYGRNPTNYSFVTGFGDNPAVGIHHRPSYADGIKAPVPGWLAGGAHNGKQDGCEYPSDAPAKSYLDDWCSYSTNEIAINWNAPLVYILAAVNNL

SEQ ID NO: 29 - DNA, 1737 bp, Microbulbifer degradans
atgaacaaagttaaagttttagcgctgtgtgccagtgtggctgtaatgataggttgcagtgatgccgacactaaattagctaactcggccaaggccgaggtgggctttaccaaagtgaatcagctgggttatttgcccgcggccaaaaagctggcggtggtacccgccgttgcagctgcaaaattcgacataatcgatgtaactagcggtaaagtagcgtttacggggagtttaagcgacgtaaaaagctggagcgcgatgggggacgaatctttcaagttggcagactttagcgccctgcaagccgaagggagttaccgcttagttgttcagggtgtgagtgattcttacaccttcgatattagcccaagtgtatatagccaagcgcacgatggagcccttaaagcctattactataatcgagcgagcacagagttaacagaacagtacgccggggtgtatgcgcgacctgcggggcacccagataccgacgtacgcatattcgataacgccgcctcagccgcgcgcccagcagatacaagctttgctgcaccaaagggttggtacgatgctggcgattacggcaagtacattgttaacagtggtatttccacttacaccctaatggctgcgtacgagcatttcccgtcgttttacaagcaacgcgatatagatattcccgaatctggcgatgccgtaccggatattctcgacgaggtaatgtggaaccttgaatggatgcaggtcatgcaagacccgaacgacggcggtgtgtaccacaagcttaccaccctgaatttttctggcgcagtcatgccgcacgaagcgactgcgcagcgctattttattaaaaaatctaccgctgcaacgctagattttgccgcggttatggccactgcaagccgagtatacgcaccgttcgaaggtgcttttcctggtaaatcagctgcttatcgacaggcggccattgctgcgtgggagtgggcacaagcaaaccctagtgagacatattcgcagacaccgctgagcaaagttcaaaccggcgcctatggtgataaaaagttaaacgatgaatttgcgtgggcggccgcagagttgtttatattgaccggcgagcaaaaatactggcaggcgtttaacaagcaaaaagtgcaggcgggtgagtctagctgggcgaatgttgcggggttggggtttatttccttggccaataatgcgcgcagcctgttaaacgaagctcaatacaaaaccgttaccgattcaattgttcgcgctgcagatagcttgcttgttacttacaaagagaatgcctaccaagtacccattggcaacaaagattttttctggggtggcaattccggcacgttaaatcgcgcttgggttttgcttgaggccaataaaattaaaccgcagcaagaatacatcgatgctgcacttgccgcggtggattatatttatggtcgcaaccctaccaactactcttttgtcactgggtttggcgataaccctgcggtgggtatccatcatcgtccatcctatgccgatggcattaaagcccctgtgcctggttggcttgcgggcggtgcgcacaatggcaagcaagatggttgtgagtacccttccgatgcaccggcaaaatcctatctagacgactggtgcagttactccaccaacgaaattgctattaattggaatgcgccgttagtttacatactggctgcggtaaataatttgtag

SEQ ID NO: 30 - protein, 867 aa, Microbulbifer degradans
MNLTSIMFEQSVKKVAKSAIAVAVASAVTLSAAQAEVGNPRVNQVGYIPNGAKVASYVAPSNTAQTWQLLRNGSVVASGTTTPKGTDAASGDNIHHIDFSAVSATGEGFSLLVGGDESYPFEISADAFTPVLYDSIRYFYHNRSGIAIETQYTGGGNGSYAANAQWARPAGHINQNANQGDNAVPCWSGSGCNYALDVTKGWYDAGDHGKYVVNGGISVWKLLNMYERALHISGSQNKYADGTLNIPESGNGVADILDEARWQMEFLLAMQVPEGEAKAGMVHHKMHDVGWTGLPLAPHEDNRERALVPPSVTATLNVAATGAQCARLFDEIDASFAASCLTAAERAWDAALQNPNDVYTGGYDNGGGGYGDEVADDEFFWAAAELYITTGDSKYLSTINNYNVTRIDWGWPDTELPALMSLAVVPANHTANLRATARAKIVEIADTHVATSNAAGYLTPSSALDYYWGSNNGVANKIALLGLAYDFTGDDVYAKTVSKAVNYLFGNNTLSFSYISGHGENALQQPHHRFWAGALNGSYPWLPPGALSGGPNAGLEDGVAAAALSACVSTPAKCYMDDIESWSTNEITINWNGALVWAMAFYDDYADSGSGSSSSSSSSSSSSSSSSSSSTSSSSSSSSSSSSSGSSSSSSSSTSSSSSSSSSGGECVEMCKWYQDAPRPLCNNQNSGWGWENQQSCIGRTTCESQSGNGGVINSCGTSSSSSSSSSSSSSSSSSSSSSSSSTSSSSSSSSSSSSSSTSSSSSSSSGGVAGVACAVTKMNHWGSGYQLDVTVSNNGAAAVSGWSIELDFGESPQLTGSWNAAVSASGNTVSATNISWNGNLSAGQSTSFGMQGNSDGSLSTPSCLVK

SEQ ID NO: 31 - protein, 49 aa, Microbulbifer degradans
MEELLEELEPLDEELLLEDDELEVELEELDEELDELEELDELEPLPESA

SEQ ID NO: 32 - DNA, 2604 bp, Microbulbifer degradans
atgaatcttacttcaatcatgtttgaacaatcagtaaaaaaagtcgctaagtcagccattgccgtggcagttgcttcggcggttaccttaagtgcggcgcaggccgaggtgggtaacccacgtgttaaccaagtaggctatatacccaatggtgccaaagttgccagttatgttgcgccatcaaatacggcacaaacgtggcagttactgcgtaatggcagtgtggttgcaagtggcactacaaccccaaagggtacagatgcagcctcgggtgacaatattcaccatatcgatttttctgcggtgagtgcaaccggcgaaggttttagtttgcttgtgggcggcgatgaaagttacccctttgaaatttctgccgacgcatttacaccggttttatacgattccatccgttacttttatcacaaccgttcgggtatcgcgattgaaacgcagtacaccggtggcggtaacggtagctacgcggcgaatgctcagtgggctaggcccgcaggtcacattaatcaaaatgctaaccaaggcgataatgcggtgccgtgttggtcgggcagtggttgcaactacgccttagacgtaactaaaggttggtacgatgccggtgaccacggtaaatatgttgtaaacggtggcatttccgtatggaagctattaaacatgtacgagcgtgccttgcacattagtggcagccaaaataaatacgccgacggtacattaaatattcctgaaagcggcaatggcgtggcggatattttggatgaagctcgctggcaaatggagtttttattagccatgcaagtgccagagggcgaagcgaaagctggcatggtgcaccacaaaatgcacgatgtgggttggacaggcttgccactagcaccccatgaagataatcgcgagcgcgcgcttgtgccgccttcggttactgcaacccttaacgttgcggccacaggcgcgcagtgtgcgcgtttatttgacgaaatagatgcgagttttgcagcaagttgtttaactgccgcagagcgcgcatgggatgcagccctgcaaaaccctaacgatgtttacactggcggctacgataatggcggcggtggttacggcgatgaagtggcggacgacgagtttttctgggctgctgctgagttatacattaccactggcgatagcaaatatctttcaaccattaacaactacaatgtaacgcgcattgattggggctggccagataccgagttgcctgcgttgatgtcgttagcggttgtgcctgctaatcacaccgcaaatttgcgtgcgactgctcgtgcaaaaattgtagaaattgcagatacccatgtcgctaccagtaatgctgccggctatttaacaccatcgtccgcgctggattactactggggttctaacaatggcgtagccaataaaattgcgttacttggtttggcatacgattttactggcgatgacgtttacgcgaaaacggtgtcgaaagcagttaactatttatttggtaataataccttatcgttttcttatatttctgggcatggcgaaaatgctttgcaacagccgcatcaccgcttttgggctggggcattaaatggaagttacccatggttgccgcctggtgcgctttctggtggccctaacgcagggttagaagatggcgttgccgccgccgcgctaagtgcttgtgtttcaacgcctgccaaatgctatatggatgatattgaatcttggtcgaccaacgaaattactattaactggaatggtgcattggtttgggcaatggcgttttatgatgactacgccgattcgggtagcggttctagctcgtcaagttcttctagctcatctagctcttcgtcaagttcttccagttcgacttctagctcgtcgtcttctagtagtagctcttcgtcgagcggctcgagttcttctagcagctcttccacatccagttccagctcttcgagttcatcgggtggggagtgtgtagaaatgtgtaagtggtatcaagatgcaccgcgccctctatgcaataaccaaaacagcggttggggatgggagaaccagcagagttgtattggtagaacaacttgcgaaagtcaaagtggcaatggtggagtgattaattcgtgcggcacgtctagctcgagctcttcatctagctctagcagtagctcttcgagttcatccagctcttctagcagttcttccacatcaagctcgtcgagtagttcgtcttctagctcttctagttcgacttcaagttcttcgtcgagcagttcagggggcgttgcaggtgtggcttgtgcggtaaccaaaatgaaccattggggcagcggatatcaattagatgtaacagtttctaataatggtgctgcagcggtaagtggttggagtattgaactcgattttggtgaatcgccacagcttactggtagttggaatgctgctgtatcggcatctggtaatactgtatcggctactaacattagttggaacggtaatttaagcgctgggcaatctacctcttttggtatgcagggtaattcagatggttcgctgagcacgccaagctgtttagttaagtaa

SEQ ID NO: 33 - protein, 1072 aa, Microbulbifer degradans
MKNTLSFKTSLLAGLVASSLLVAACQGVKQQTEATQTKHNITLWPQASSPVIKSPDYEAEVEAKVEALLGQMTLEQKVGQILQPEIQSIKPHEVKEYHIGSVLNGGGSMPNRIENAPPIEWVKLADAFYDASMDDSDGGIAIPIIWGTDAVHGHGNVTGATIFPHNIGLGAARNPALIEKIGEITAKEVRATGIEWIFGPTLAVAQNDLWGRTYESYSEDPAIVADYASAMVVGMQGKVDDSDFLSTNRVVATAKHFLADGGTLGGNDQGDARISEEELVQIHNAGYVPAIESGVQTVMASFSLWNGVKMHGNNYLLTQALKERMGFDGFIVGDWNGHGQVPGCTNESCPQSLNAGLDMYMVPYDWKKLYRNLISQVQSGEIAPSRLDDAVRRILRVKIRANLWAAKPSERINLATIDEVVGHANHREVARQAVRESLVLLKNKNSVLPIAANKTVLVAGDGADNIGKQSGGWSVSWQGTGNTNASFPGGTSIYKGIADAVTQGGGKATLSVDGSYKTKPDVAIVVIGEDPYAEGQGDRNSLEFEPVNKKSLELLKKLKADGIPVVTVFISGRPMWANPEINASDAFVAAWLPGSEGQGVADVLIGNANGKPRFDFKGTLSFSWPKLPTQGLLNPTHPNYDPLFKLGYGLTYASSETGPEQLAEDVEGVDKGSTGDINFYVGRTLEPWEVFVRTPESSQRLSGPFADLGNASVRTSDMQVQEDALTFTWGGSWMSILGIEGGRGYDLSSQYKEGGVISFNFNSIDMAKGDLKVQMACGEGCTREVDITTIARDLEGKGWQSLTVPLACFAHEGDDFTHITAPFNLFAGGKGQVAVANIRILRAGTQTVPCVLPKDVSVTPEPLNASWAIDWWMPRHKEKLARIQQGNVDLLMIGDSITHGWEDAGKDVWAQYYAHRNAVDLGFSGDRTENVLWRLQHGEADGIKPKVAVVMIGTNNAGHRHEPSHYTAKGVAAVVAELQKRLPETKILLLGIFPRGETSEDPLRVLNAKTNTLLAKMADGEKVVYLNINKTFLDENGVLPKDIMPDLLHPNEKGYALWAKAMEPTLKKMLGE

SEQ ID NO: 34 - DNA, 3219 bp, Microbulbifer degradans
atgaaaaatactttatcctttaaaacatccttgcttgcgggcttggtggcatccagtttactggttgcggcctgtcagggtgttaaacagcaaacggaagctactcagacaaagcacaatattaccttatggccgcaggcgtctagccctgtaataaagtcgccagattacgaagcggaagtggaagccaaggtagaagcgttgttaggacaaatgacgctagagcaaaaagtagggcaaatcctacagccagaaattcaatctattaagccgcatgaagtaaaagaataccacattggctctgtactaaatggtggtggctctatgcctaaccgcatagaaaatgcgccgcccattgaatgggtaaaattggccgatgccttttacgatgcctctatggacgattctgacggtggaatcgcaattcccattatttggggtaccgatgccgtacacggtcacggcaatgtaactggcgcaaccatattcccgcataacataggccttggtgctgcacgcaacccagcgcttatcgaaaaaattggcgaaataacggcaaaagaagtacgcgcaaccggcattgaatggatatttggcccaactttggccgtagcgcaaaacgatttatggggccgcacttacgaaagctactcggaagacccagccatagtggccgactacgccagtgccatggtggtaggtatgcagggcaaagtggacgacagcgattttctgtccactaatcgcgtagttgccacagcaaagcactttttagctgacggcggtaccttaggaggcaacgatcaaggtgatgcgcgcataagcgaagaagagttggtgcaaattcataatgcgggctatgtgcctgccattgaatcgggcgtgcaaacggttatggccagtttctctttgtggaatggcgtaaaaatgcatggtaacaactacctacttacccaagcacttaaagagcgtatggggtttgatggttttatagtaggggattggaatggccacgggcaggtacctgggtgcaccaacgaatcttgccctcaatcgctaaacgccggtttagatatgtacatggtgccttacgattggaaaaaactgtacagaaacttaattagccaagtgcaatcgggtgaaattgccccaagccgtttagatgacgctgtacgccgtattcttcgggtaaaaattcgcgctaatttgtgggctgcgaaaccttcagagcgaattaatctagccactattgacgaggtggttggccacgcaaaccaccgtgaggtagcgcggcaggcggtgcgagaaagtttagtattgttaaaaaataaaaatagcgtactgcctattgctgccaataaaaccgtgctggttgcaggtgacggcgccgataatattggcaaacaatctggcggttggagtgtaagctggcagggcactggtaacaccaatgcatccttccccggtggtacatctatttataaaggtattgccgatgcagtcactcagggcggcggtaaagctacgctttctgtggatggcagctacaaaactaaacccgatgttgccattgtggtaataggcgaagacccttacgccgaaggccaaggcgaccgcaatagtttagagttcgagccggtgaataaaaaatcgcttgagctattaaaaaaattaaaagcagatggcatacccgttgtaacagtatttatttctggccgacctatgtgggctaacccagaaattaacgcgtctgatgcatttgttgccgcgtggttacctggctctgaagggcagggcgtagcagatgtacttataggcaacgccaacggcaagcctcgttttgatttcaagggcaccttgtcgttctcttggcctaagctgccgacccaaggcttgctcaacccaacgcaccccaactacgacccgttatttaaattgggatacgggctaacttatgcctcgagtgaaactggcccagagcaattggcggaagatgttgaaggtgtagataaaggctcaaccggcgacattaatttttatgttggccgcacattagagccgtgggaagtgtttgttcgaactcctgaaagttcgcagcgtttaagtggcccatttgcagacttaggcaatgccagtgtgcgtaccagtgatatgcaggtacaagaagatgcccttacttttacttggggcggtagctggatgtctattctgggaatagaaggagggcgcggttacgacctttcttcgcaatataaagaaggcggagtaataagctttaacttcaattcaatagatatggctaaaggcgatttaaaagtacaaatggcctgtggtgaaggttgcacgcgtgaagtagatatcacaactatcgcacgcgacttggaaggcaaaggctggcagtcgttaacagtgcccttagcgtgctttgcacacgaaggcgacgatttcacccatattactgcgccgtttaacttatttgccggtggaaaaggtcaagttgctgtagccaacattcgcatactgcgcgccggtacacaaaccgtgccgtgtgtattgcctaaagatgtttccgtaacgccagagccgctgaatgctagctgggcgatagattggtggatgccgcgccacaaagaaaaactggcgcgtatccagcaaggtaatgtggatttactaatgattggcgattccattacccacggctgggaagatgcaggtaaagacgtgtgggcgcaatattacgcgcaccgcaatgcagtggacttaggctttagtggcgaccgaaccgaaaacgtattgtggcgcttacagcacggcgaagcagacggtattaagcctaaagtggcagtggttatgattggtaccaacaatgccggccatcgtcacgagccttcgcactacacagccaagggtgttgcggctgtcgttgctgaattgcaaaaacgattgcctgaaacaaagatattattactgggtatattccctcgcggcgaaaccagtgaagaccctttgcgggtattaaatgccaaaaccaatactcttttggcgaaaatggccgacggagagaaggtggtgtatttgaatatcaataaaacgtttttagatgaaaacggcgtattgcctaaagatataatgcccgacctattgcaccccaatgaaaaggggtacgcattgtgggcgaaagcgatggaacccacccttaaaaaaatgctgggcgaatag

SEQ ID NO: 35 - protein, 862 aa, Microbulbifer degradans
MLKKINKKGLALSLAIAAMLSGCNEGDSNKTKPSAETLSATQASNTVANPSIWPKVTSKVAKDAKMEADISAILSGMTLEQKVAQMIQPEIRAFSKEDMKKYGFGSYLNGGGAFPNDNKHSTMADWVALADDMYEASIDDSIDGSTIPTMWGTDAVHGHNNVVKATIFPHNIGLGAMHNPKLMQQIGAATAKVVQVTGIDWVFAPTVAVVRDDRWGRTYEGYSEDPAIVKEYARAMVIGMQGEANSEAFMGDGTVIATAKHFLGDGGTDKGDDQGNNLSTEQELIDIHAQGYISAIEEGVQTIMASFNSWNGEKMHGNKSLLTDVLKKQMGFDGLVVGDWDGHGQVKGCSNASCAQAINAGVDIIMVPNEWKPMFENTVAQVKSGEISEARINDAVTRILRVKMRAGIFDGVKPSDRAFAAEEKYLGSAENRAIARQAVRESLVLLKNQNKLLPLDRKMNVLMAGSGADNIGKQSGGWTLSWQGTGNVNSDFPGATSIYDGVNQVVSSAGGKVELSENGNYQAKPDVAIVVFGENPYAEGVGDIEGIEYQLNNKRDINLLQKLKADGIPVVSVFLTGRPLWVNKELNASDAFVAAWLPGSEGVGVSDVLFKKADGSINYDFKGKLTYSWPKYDDQVVINKGDKDYAPLYPYGYGLTYSDVDTQGDDLPEETKVKIGRADDEPMAIFDSLPQSDLGFFLGDKANWVVPIATSVVTTHNSDNLTMRTYNWKVQEDARQLIWKGDSKANAFFAWPDPHNMQGMLEHKAAYSFSIKVDKAPAGDLTLGIHCMEECGKKLVLNEALSKIPAGEWGELTIDLACIADAEALAEVRSPFMLSTDAPASIVFGDVKLVPGGADSAAIKCD

SEQ ID NO: 36 - DNA, 2540 bp, Microbulbifer degradans
atgctcaaaaagataaacaagaaaggtcttgctttaagcttagcaattgcagcaatgctaagcggctgcaacgaaggcgacagcaacaaaaccaaaccaagtgcggaaaccctctccgctactcaagccagtaacactgtagccaaccccagcatttggcccaaggtaactagcaaggttgccaaagacgccaaaatggaagcagatataagcgcaatactcagcggtatgacccttgagcaaaaagtagcccaaatgatccaacccgaaattcgtgccttcagcaaagaagacatgaaaaagtatggttttggctcctaccttaacggtggcggcgcattccctaacgacaacaaacattccaccatggccgactgggttgccctagccgacgacatgtatgaagcctctatagacgacagcatagacggcagcactattccaaccatgtggggtaccgatgcagtacacggccacaacaacgtggttaaagcgactattttcccacacaacattggccttggcgccatgcataaccccaagctcatgcagcaaataggcgctgccacggctaaagtggtacaagttactggtatcgactgggtatttgcgcccactgttgcggtagtgcgcgacgaccgctggggccgtacttacgagggctactctgaagaccccgccatagtaaaagaatacgctcgcgccatggttattggcatgcagggcgaagccaatagcgaagcgtttatgggtgacggcactgttatagccaccgccaaacactttttgggcgatggcggcaccgacaaaggcgacgaccaaggcaacaacttatccaccgaacaagaattaattgatattcacgcccaaggctatataagcgccattgaagaaggtgtgcaaactatcatggcatctttcaatagctggaatggcgaaaagatgcacggcaataaatctctgcttaccgatgtccttaaaaagcaaatgggctttgacggtttggtggttggcgattgggatggccacggccaagtaaaaggttgctctaatgcaagctgtgcccaagccatcaacgccggtgtcgatatcatcatggtacccaatgagtggaaacccatgttcgaaaacaccgttgcacaagttaaaagcggcgaaatctctgaagcgcgaattaacgatgcagttacccgtattttacgtgtaaaaatgcgcgctggtattttcgacggtgttaaaccatcggatcgcgccttcgcagcagaagaaaaatacctaggctctgccgaaaaccgcgctatcgctcgtcaagctgtacgcgaatcgttagtgttgcttaaaaaccaaaacaaactgctgccattagaccgcaaaatgaacgttttaatggcgggttctggcgcagacaacatcggcaagcaaagtggtggttggacattaagctggcagggtactggcaacgtgaacagcgacttccctggcgcaacatctatttacgacggcgttaaccaagtagtgagcagcgctggcggtaaagtagagctaagcgaaaacggcaactaccaagccaaaccagatgtagcgattgtagtatttggtgaaaacccttacgcagaaggcgtaggcgatattgaaggtattgaataccaactaaacaataagcgcgatatcaatttgttacaaaaactcaaagccgatggcattcctgttgtatcggtattcttaaccggtcgtccactttgggtaaacaaagagcttaatgcctccgatgcttttgttgcagcttggctgccaggctctgaaggtgtaggcgtttctgatgtgctattcaaaaaagccgacggtagtattaactacgactttaaaggcaagctaacttactcttggccaaagtatgatgaccaagtagtaataaacaaaggcgacaaagattacgccccgctttacccttatggttacggcttaacctacagcgatgttgacacccaaggtgacgacttacctgaagaaaccaaagttaaaattggccgcgctgacgacgagccaatggccatcttcgacagcctaccccaaagcgacctcggcttcttccttggcgacaaagccaactgggtagtacctattgcaacaagtgtagttacaacgcacaacagcgataacctaaccatgcgcacctacaactggaaagtacaagaagatgctcgccagttaatttggaaaggcgacagcaaagccaatgccttctttgcatggccagacccacacaatatgcaaggcatgttagaacacaaagcggcttacagctttagcattaaagtagataaagcacccgctggcgacctaacactaggcatacactgcatggaagaatgcggtaaaaaacttgtgcttaacgaagcgcttagcaaaattcctgctggtgagtggggagagctaacaatagatctagcttgcatagcagatgccgaagccttggccgaagttcgctcacccttcatgctaagcaccgatgcacccgcatctatcgtgtttggcgatgt

SEQ ID NO: 37 - protein, 862 aa, Microbulbifer degradans; identical to SEQ ID NO: 35

SEQ ID NO: 38 - DNA, 2589 bp, Microbulbifer degradans
atgctcaaaaagataaacaagaaaggtcttgctttaagcttagcaattgcagcaatgctaagcggctgcaacgaaggcgacagcaacaaaaccaaaccaagtgcggaaaccctctccgctactcaagccagtaacactgtagccaaccccagcatttggcccaaggtaactagcaaggttgccaaagacgccaaaatggaagcagatataagcgcaatactcagcggtatgacccttgagcaaaaagtagcccaaatgatccaacccgaaattcgtgccttcagcaaagaagacatgaaaaagtatggttttggctcctaccttaacggtggcggcgcattccctaacgacaacaaacattccaccatggccgactgggttgccctagccgacgacatgtatgaagcctctatagacgacagcatagacggcagcactattccaaccatgtggggtaccgatgcagtacacggccacaacaacgtggttaaagcgactattttcccacacaacattggccttggcgccatgcataaccccaagctcatgcagcaaataggcgctgccacggctaaagtggtacaagttactggtatcgactgggtatttgcgcccactgttgcggtagtgcgcgacgaccgctggggccgtacttacgagggctactctgaagaccccgccatagtaaaagaatacgctcgcgccatggttattggcatgcagggcgaagccaatagcgaagcgtttatgggtgacggcactgttatagccaccgccaaacactttttgggcgatggcggcaccgacaaaggcgacgaccaaggcaacaacttatccaccgaacaagaattaattgatattcacgcccaaggctatataagcgccattgaagaaggtgtgcaaactatcatggcatctttcaatagctggaatggcgaaaagatgcacggcaataaatctctgcttaccgatgtccttaaaaagcaaatgggctttgacggtttggtggttggcgattgggatggccacggccaagtaaaaggttgctctaatgcaagctgtgcccaagccatcaacgccggtgtcgatatcatcatggtacccaatgagtggaaacccatgttcgaaaacaccgttgcacaagttaaaagcggcgaaatctctgaagcgcgaattaacgatgcagttacccgtattttacgtgtaaaaatgcgcgctggtattttcgacggtgttaaaccatcggatcgcgccttcgcagcagaagaaaaatacctaggctctgccgaaaaccgcgctatcgctcgtcaagctgtacgcgaatcgttagtgttgcttaaaaaccaaaacaaactgctgccattagaccgcaaaatgaacgttttaatggcgggttctggcgcagacaacatcggcaagcaaagtggtggttggacattaagctggcagggtactggcaacgtgaacagcgacttccctggcgcaacatctatttacgacggcgttaaccaagtagtgagcagcgctggcggtaaagtagagctaagcgaaaacggcaactaccaagccaaaccagatgtagcgattgtagtatttggtgaaaacccttacgcagaaggcgtaggcgatattgaaggtattgaataccaactaaacaataagcgcgatatcaatttgttacaaaaactcaaagccgatggcattcctgttgtatcggtattcttaaccggtcgtccactttgggtaaacaaagagcttaatgcctccgatgcttttgttgcagcttggctgccaggctctgaaggtgtaggcgtttctgatgtgctattcaaaaaagccgacggtagtattaactacgactttaaaggcaagctaacttactcttggccaaagtatgatgaccaagtagtaataaacaaaggcgacaaagattacgccccgctttacccttatggttacggcttaacctacagcgatgttgacacccaaggtgacgacttacctgaagaaaccaaagttaaaattggccgcgctgacgacgagccaatggccatcttcgacagcctaccccaaagcgacctcggcttcttccttggcgacaaagccaactgggtagtacctattgcaacaagtgtagttacaacgcacaacagcgataacctaaccatgcgcacctacaactggaaagtacaagaagatgctcgccagttaatttggaaaggcgacagcaaagccaatgccttctttgcatggccagacccacacaatatgcaaggcatgttagaacacaaagcggcttacagctttagcattaaagtagataaagcacccgctggcgacctaacactaggcatacactgcatggaagaatgcggtaaaaaacttgtgcttaacgaagcgcttagcaaaattcctgctggtgagtggggagagctaacaatagatctagcttgcatagcagatgccgaagccttggccgaagttcgctcacccttcatgctaagcaccgatgcacccgcatctatcgtgtttggcgatgtgaagttagtacctggcggtgcagatagcgcagctattaagtgtgactaa

SEQ ID NO: 39 - protein, 461 aa, Microbulbifer degradans
MKTFNPDFVWGAASSAYQVEGATTTDGRGPSIWDAFSSIPGKTYHNQNADIACDHYNRWQEDVAIMKEMGLKAYRFSISWSRIFPTGRGEVNEKGVAFYNNLIDELIKNDITPWVTLFHWDFPLALQMEMDGLLNPAIADEFANYAKLCFARFGDRVTHWITLNEPWCSAMLGHGMGSKAPGRVSKDEPYIAAHNLLRAHGKMVDIYRREFQPTQKGMIGIANNCDWREPKTDSELDKKAAERALEFFVSWFADPIYLGDYPASMRERLGERLPTFSDEDIALIKNSSDFFGLNHYTTMLAEQTHEGDVVEDTIRGNGGISEDQMVTLSKDPSWEQTDMEWSIVPWGCKKLLIWLSERYNYPDIYITENGCALPDEDDVNIAINDTRRVDFYRGYIDACHQAIEAGVKLKGYFAWTLMDNYEWEEGYTKRFGLNHVDFTTGKRTPKQSAIWYSTLIKDGGF

SEQ ID NO: 40 - DNA, 1386 bp, Microbulbifer degradans
atgaaaacctttaacccagatttcgtatggggagcagccagttccgcctatcaggtagaaggcgccaccaccaccgatggcagaggccccagtatttgggatgcgttcagttccattcccggtaaaacctaccacaaccaaaacgccgacatagcctgcgaccactacaaccgctggcaagaagacgtggccataatgaaagagatggggctaaaggcttaccgcttttctatttcttggtcgcgcatattccctactgggcgcggcgaagttaacgaaaaaggcgtagccttttacaacaaccttatcgacgaattaataaaaaacgacattaccccttgggtaaccctatttcactgggactttcctctggcactgcaaatggaaatggacggcctacttaaccccgccatcgccgacgaattcgccaactacgccaagctgtgtttcgcgcgctttggcgaccgcgttacccactggattaccctaaacgaaccttggtgcagtgccatgcttggccacggcatgggcagcaaagcccctggccgcgtatctaaggatgaaccctatatagccgcccacaacttgctgcgtgcacacggcaaaatggtagatatttaccggcgcgaatttcagcccacacaaaaaggcatgataggcatagccaacaattgcgactggcgcgaacccaaaaccgattctgaattagataaaaaagcagccgagcgcgccctagaattttttgtaagctggtttgccgaccccatttatttgggcgactacccagccagcatgcgcgagcgcttgggtgagcgtttacccacctttagcgacgaagacattgcgctaataaaaaactctagcgacttttttggtttgaatcactacaccaccatgcttgccgaacaaacccacgaaggtgacgttgttgaagatactattcgcggcaacggcggcatatcggaagaccaaatggtcaccctctccaaagacccaagctgggaacaaaccgacatggagtggagcattgtgccctggggctgtaaaaaattattaatctggttaagcgagcgctacaactaccccgacatttacattaccgaaaacggctgcgccctacccgacgaagacgacgtaaacatagccattaacgatacacgccgcgtagatttttaccgcggttatatcgatgcgtgtcaccaagcaatagaggccggcgtaaaactaaaaggctattttgcatggacacttatggataactacgaatgggaagaaggctacaccaaacgctttggcttaaaccatgtagatttcaccacaggcaaacgcacacctaaacagtctgcaatttggtatagcacgttaattaaagatggtgggttctag

SEQ ID NO: 41 - protein, 444 aa, Microbulbifer degradans
MNRLTLPPSSRLRSKEFTFGVATSSYQIEGGIDSRLPCNWDTFCEQPNTIIDNTNGAIACDHINRWQDDIELIANLGVDAYRFSIAWGRVINLDGSLNNEGVTFYKNILTKLREKNLKAYITLYHWDLPQHLEDAGGWLNRDTAYKFRDYVNLITQALDDDVFCYTTLNEPFCSAYLGYEIGVHAPGIKDLASGRKAAHHLLLAHGLAMQVLRKNCPNSLSGIVLNMSPCYAGSNAQADIDAAKRADDLLFQWYAQPLLTGCYPDAINSLPDNAKPPICEGDMALISQPLDYLGLNYYTRAVFFADGNGGFTEQVPEGVELTDMGWEVYPQGLTDLLIDLNQRYTLPPLLITENGAAMVDELVNGEVNDIARINYFQTHLQAVHNAIEQGVDVRGYFAWSLMDNFEWALGYSKRFGITYVDYQTQKRTLKASGHAFAEFVSSRS

SEQ ID NO: 42 - DNA, 1335 bp, Microbulbifer degradans
atgaatagacttacactaccgccttcttctcgtttgcgcagcaaagagtttacctttggtgttgcaacgtcgtcttaccaaattgaaggcggcatagattctcgcctgccctgtaattgggatacgttctgtgagcagcccaataccattattgataacaccaacggcgccattgcttgcgaccacataaatagatggcaagacgatatagaacttattgccaacctaggggtagatgcctaccgcttttctattgcgtggggccgtgttattaatttagacggcagcctcaataatgaaggcgttacattttacaaaaatattttaactaagcttcgcgaaaagaatttaaaagcttatataacgctataccactgggacttgccacaacatttagaagatgctggcggctggcttaaccgcgataccgcctacaagtttcgcgactatgtaaaccttataacccaagcgcttgatgacgatgtattttgctacacaacgttaaacgagcccttttgcagtgcctaccttggctatgaaattggtgtacacgcaccgggtataaaagacttagccagtgggcgcaaagccgcacaccatttattacttgcccatggcttagctatgcaagtgctgcgaaaaaactgccccaatagtttaagcggcatagtgttaaacatgagcccttgttacgccggcagcaacgcacaagcagatatagatgcagcaaaacgcgcggacgatttattatttcagtggtatgcacaaccgctacttactggctgctaccctgatgcaataaacagcctgccagacaatgccaaaccacctatttgtgaaggcgacatggcgttaataagccaacctttagattatttaggccttaactactatacccgcgcagtattttttgccgacggtaatggcggttttaccgaacaagtacctgagggtgtagagctaaccgatatgggctgggaagtttacccgcaaggcttaaccgatttactaatagacctaaaccaacgctataccctacccccgttacttattaccgaaaacggcgcagcaatggtggacgaacttgttaacggcgaagttaacgatattgcccgaataaattattttcaaacccatttacaagcggtacacaacgccattgaacaaggtgttgatgtacgcggttattttgcttggagcctaatggataattttgagtgggcactgggttacagcaaacgattcggtattacctatgtagattaccaaacacaaaagcgaacgctaaaagccagcggccacgcatttgctgagtttgtctcgagtaggagctaa

SEQ ID NO: 43 - protein, 866 aa, Microbulbifer degradans
MLLSLKNTQLKRSMNMNLKHLFLVALALNIAACNVKEPAATNDNHISYQAAREARLAKVEAEVERLLPLLTLEEKASLVHANSKFSIASIERLGIHEMWMSDGPHGVRYQIERHGWAPAGWTDDNSTYLPPLTTVAASWNPEIAALHGDVLGAEARHRRKDVILGPGVNLARLPLYGRNFEYMGEDPFLASRLAVAEIKAIQENDVAACIKHFALNNQELNRTGVNAKPDERTLREVYLPAFEAAVKEAGVHTIMGAYNEFRGTNANQSKHLVMDILKGEWGYKGVLLTDWNVDINTYDAAVNGLDIEMGTNVDSYDDYMLAQPMIDMIKAGSIPESVLDDKVRRILRVQLSIGMMDKYRLSGERNTAKHHEAARKIASEGIVLLKNENILPLNKNKIKNVLVLGPNADKVHGLGGGSSEVPALYEITPLQGLKQKLGDNVNITVMRARYDGVLMPIASDYVTSRHWTGTPAWNMVRYSDAARTQAIGDSAIVDSAYSSPAGTTKEYVTMTATIKPLKSGEHTLKTSVMGDFELKINGKTTVKHSSTSGDVVTQKIALNGGETYSFEILYSGNKNFTLGWDAPGDLFTAEKEYIAAAKKADVVFYFGGLTHGDDREAIDRPHMKLPNHQDPVISKVLAANPNTVVFLIAGSAVEMPWADKAKAIVWGWYGGMEAGNAYADMLFGDTNPSGKMPITLPKALEDTAPIALNDYNPVESLYTEGVFIGYRWFEKQNIEPLFPFGHGLSYTQFKYNNIKLSSANIKGDQTVTVSATITNTGKVAGAEVVQLYLHDEQASVERPAKELKGFQKVFLKPGESKAVNITLNKRALSFWDENSNDWLAETGKFNVLLGASVSDIRLQTSFQYQQ

SEQ ID NO: 44 - DNA, 2601 bp, Microbulbifer degradans
atgctgctaagcttaaaaaacactcaactcaaaagaagtatgaacatgaaccttaaacacctctttctggttgctttggcgctaaatattgctgcgtgcaatgtaaaagagcccgcggcgacaaatgataaccacattagctaccaagccgctcgcgaagcgcgcttggcaaaagttgaagccgaagttgaacgcctgctgccactattaacactagaagaaaaagcctctttggttcatgcgaacagcaaattctctatcgcctctatcgagcggctaggcattcacgaaatgtggatgtctgatggcccccacggcgtgcgctatcaaatcgaacgccacggctgggcaccagcaggctggacagatgacaactccacttacttaccaccgcttactaccgtagccgccagctggaaccccgaaatagctgcccttcacggcgatgtactcggcgcagaagctcgccaccgccgtaaagatgtaatattaggcccaggcgtaaacttagctcgcctgccactttatggtcgtaactttgaatatatgggtgaagaccccttcttggcatcacgtcttgctgtggcagaaattaaagccattcaagaaaatgacgtggccgcctgtatcaaacatttcgcgcttaacaatcaagagctgaatcgcaccggcgtaaacgccaaacccgatgaacgcacattacgcgaagtgtatttacccgccttcgaagccgccgttaaagaagcgggcgtgcacaccataatgggggcctacaatgaatttcgcggtaccaacgccaaccaaagcaaacatttagtaatggatattctaaaaggcgaatggggctacaaaggcgtgttactcacagactggaacgtagatatcaacacttacgatgccgctgttaacggcctcgatatcgaaatgggtacaaatgtagatagctacgacgactacatgcttgcccaaccaatgatcgacatgattaaagcgggcagcattccagagtcagtacttgatgataaagttcgtcgcatactgcgcgtgcaactcagcataggcatgatggacaaataccgcttatctggtgagcgcaatactgccaagcatcacgaagctgcacgcaaaattgcatctgaaggtattgtgctactaaaaaatgaaaacattctgccgctaaataaaaacaaaattaaaaacgtattggtgcttggccccaacgcagacaaagtgcacggtttaggcggtggctcgtcagaagtgccagcactttatgaaataaccccgttacaagggttaaaacagaagctgggagataatgtaaacattaccgttatgcgcgcacgctatgacggtgtgttaatgcctatcgccagtgattatgttacttctcgtcactggaccggcacacctgcatggaacatggtgcgttactcggatgctgcgcgcacccaagctattggcgactccgccattgttgattcggcttattcttcgcctgcaggcacgactaaagaatacgtcaccatgaccgccacaattaaaccgttaaaatcgggcgagcacacactcaaaacatcggtgatgggcgatttcgaattaaaaattaacggtaaaaccacagtaaaacatagcagcactagcggcgatgtagtaacccaaaaaatcgccctcaacggcggtgaaacatacagcttcgaaattttatacagcggcaataaaaactttaccttgggctgggatgcaccgggagatttatttaccgcagaaaaagaatacatagccgccgcgaaaaaagcggatgtagtgttttactttggcggcctaacccacggcgacgaccgcgaagcaattgaccgccctcacatgaagctgcctaaccatcaagacccagttattagcaaagtattagctgcaaacccgaacacggttgtatttttaattgcaggctctgctgtagaaatgccgtgggccgataaagctaaagctattgtgtggggctggtatggcggtatggaggccggtaacgcctacgccgatatgctatttggcgataccaaccccagcggcaaaatgccaataactttaccaaaggcactggaagatactgctccaatcgcactgaatgattacaaccctgttgaatcactctacaccgagggcgtgtttattggttaccgctggttcgaaaaacaaaacatcgagccgctattcccgttcggtcatggtttgtcttatacccagtttaagtacaacaatataaagctctctagcgcgaacattaaaggcgaccaaaccgtcaccgtaagcgcaaccattaccaatactggcaaagtggccggcgctgaagttgtacaactgtatttgcatgacgagcaagcaagcgtagaacgcccagcaaaagaacttaaaggtttccaaaaagtgtttttaaagccgggtgaaagcaaagcggtaaatattacgcttaataaacgcgccctttcattttgggatgaaaacagcaacgactggcttgcagaaacaggtaaatttaatgtgctattgggcgcatcagtaagcgatatacgcttacaaactagcttccaataccagcagtaa

SEQ ID NO: 45 - protein, 811 aa, Microbulbifer degradans
MKFGHFDDKAREYVITDPKTPYPWINYLGNEDFFSLVSNTGGGYSFYKDAKFRRLTRYRYNNVPVDNGGKYFYINDSGDVWSPGWKPVKAELDAYSCAHGLSYTRITGERNGIQAEVLSFIPLGTWAEIQKVSLKNTSGATKKFKLFSFAEWCLWNAEDDMTNFQRNFSTGEVEVEDSVIYHKTEFKERRNHYAFYSVNAPIQGFDTDRDKWKGLYNDFDKPDAVFEGEPRNSEAHGWSPIASHYLEVELAPGESKDLIFVLGYIEVAPENKWESKGVINKSPAKELIARFDSVEKVDAELTKLADYWANLLSTYSVESGDEKLDRMVNIWNQYQCMVTFNMSRSASFFESGIGRGMGFRDSNQDLIGFVHQVPERARERIIDIASTQFEDGSAYHQYQPLTKRGNNAIGGNFNDDPLWLILSTTDYIKETGDFSILEEQVPYDNDASKATSHFEHLKRSFYHTVNNLGPHGLPLIGRADWNDCLNLNCFSEDPNESFQTTGNKTGRTAESLMIAGLFVLYGNEFVKLCREIGQDGEAAEAQAHIDQMVEAVKKHGWDGEWFLRAYDYYGKKVGSKENEEGKIFIESQGFCGMAGIGLEDGLVEKSMDSVKEWLDCDYGIVLQQPAFTKYYIEYGEISTYPAGYKENAGIFCHNNPWIMITETLLGRGDKAFEYYRKIAPAYLEEISDLHKVEPYAYCQMIAGKDAYLPGEGKNSWLTGTASWNFAAITQYILGVKPDYSGLAINPCIPSSWDGFKVTRKYRGATYNIIVTNPTHVSKGVKSLTLNGNAIDGYIVPPQQAGTVCNVEVTLG

SEQ ID NO: 46 - DNA, 2436 bp, Microbulbifer degradans
atgaaatttgggcactttgacgacaaagcacgcgagtatgtaattaccgacccgaaaactccctacccgtggataaactacttaggcaacgaagacttcttcagcctagtatctaacactgggggtggctacagtttttacaaagatgcaaagttccgtcgtttaacacgctatagatacaacaacgtacccgtagacaacggcggtaaatatttttacatcaatgatagtggcgatgtatggagccccggttggaagccggtaaaagcagagctagacgcatacagctgcgctcacggccttagctacacccgcattaccggcgaaagaaacggcattcaagcggaagtacttagctttatccctctcggcacttgggccgaaattcaaaaagttagccttaagaatacctctggcgctaccaaaaaatttaaactgttttctttcgccgaatggtgcctatggaacgcagaagatgacatgaccaacttccaacgcaacttctccaccggtgaagtagaggtggaagactctgttatttatcacaagacagaatttaaagagcgccgcaatcattacgcattctactctgtaaacgcaccaattcagggcttcgacaccgacagagacaaatggaaaggcttgtacaacgattttgataaacccgatgccgtttttgaaggcgagcctcgcaactccgaagcgcacggctggtcgccaattgcatctcactatctagaagtggagctcgcaccaggcgaaagcaaagacttaatttttgtgcttggctatatagaagttgccccagaaaacaaatgggaatcaaagggcgttatcaacaagtctccagccaaagaacttattgcgcgtttcgatagcgtagaaaaagtagatgccgagttaaccaagctagccgattattgggcaaatttgctttctacttacagcgtagaaagtggcgacgaaaagctagaccgcatggtaaatatttggaaccaataccagtgtatggtgacatttaatatgagtcgctctgcgtctttcttcgaatctggcattggccgtggtatgggcttccgcgattccaatcaggatttgataggctttgtacaccaagtacccgagcgcgcccgcgaacgcataattgatattgcttctactcagtttgaagacggttcggcctaccaccagtatcagcctttaaccaaacgcggcaacaacgcaattggcggcaactttaacgatgaccctctttggctaatcctttctaccaccgattacataaaagagactggcgatttctctattttagaagagcaagtgccttacgataatgatgcgagcaaagccacaagtcattttgaacatttaaagcgctcgttttatcacacggttaataatttaggcccacatggcttgccacttattggtcgcgccgactggaacgactgcctaaacctaaactgctttagtgaagaccctaacgaatcattccaaaccacgggcaacaaaaccggcagaacggctgagtcgttaatgattgcaggtttatttgttttatacggcaacgagtttgtaaaactgtgccgtgaaataggccaagacggagaagcggcagaagcccaagcccatattgaccaaatggtagaagctgtgaaaaagcacggctgggatggcgagtggtttttgcgtgcttacgactactacggtaaaaaagtaggcagtaaagaaaacgaagaaggcaaaatatttatcgaatcgcaaggtttctgcggcatggcaggaatcggcctagaagacggccttgtcgaaaaatcgatggattctgttaaagaatggttagattgcgattacggtattgtgttgcagcaaccggcgtttaccaagtactacatagagtatggtgaaatctccacctaccctgctggctacaaagagaacgcaggtatcttctgccacaacaacccgtggattatgatcaccgaaactttgcttggccgcggtgacaaagcctttgaatactaccgcaaaattgcacctgcatacctagaggaaattagcgatcttcacaaagtagagccttacgcctactgccagatgattgcaggtaaagatgcctacttacctggcgagggtaaaaactcatggctaacagggaccgcttcgtggaacttcgctgcaattactcagtacattttaggcgtaaaaccagactatagcggtttagcaattaacccttgcataccgtctagctgggatggctttaaagttacccgtaagtatcgcggcgcaacctataacatcatcgtaaccaacccaacccatgtaagcaaaggcgtaaaatcgctcaccctaaatggcaacgctattgatggctacatagtgccaccgcaacaagctggcaccgtatgtaacgtagaagttacattgggctaa

SEQ ID NO: 47 - protein, 788 aa, Microbulbifer degradans
MLKAINNGERYQLTSPTAMPQSASFLWNKKMMIQVNCRGYAVAQFMQPEPAKYAYAPNLEAKTFMQPEQPYYAHHPGRFFYIKDEETGEIFSAPYEPVRSQLNNFSFNAGKSDISWHIAALGIEVELCLSLPVDDVVELWELKIKNGGAQPRKLSIYPYFPVGYMSWMNQSGDYSQTAGGIIASCVTPYQKVADYFKNKDFKDKTFFLHETAPAAWEVNQKNFEGEGGLHNPNAIQQETLGCGNALYETPTAVLQYRRELAAQEQQTFRFIFGPAFDESEAIALRNKYLSAEGFAKAKSEYQTYITSGKGCLQINTPDPELNNFVNHWLPRQVFYHGDVNRLTTDPQTRNYIQDNMGMSYIKPNITRQAFLHALSQQEESGAMPDGILLLEGAELKYINQIPHTDHCVWLPVCMQAYLDETNDYALLDEIVPYASGEKRETVEQHMHHAMRWLLQARDERGLSFIAQGDWCDPMNMVGYKGKGVSGWLSVATAYALNLWADVCEQRQQNSCANEFRQGAKDINAAVNKHIWDGEWFGRGITDDGVLFGTSKDKEGRIFLNPQSWAILGGAADEQKIPCLLDAVEQQLETPYGVMMLAPAFTAMRDDVGRVTQKFPGSAENGSVYNHAAVFYIFSLLSIGESERAYKLLRQMLPGPDEADLLQRGQLPVFIPNYYRGAYYQHPRTAGRSSQLFNTGTVSWVYRCLIEGVFGLKGSPQGLVVQPQLPVAWQTAEAVREFRGATFNVSYRKSSDIKEMEIQLNESVISGNTISDITAGATYQLTVLLPATH

SEQ ID NO: 48 - DNA, 2367 bp, Microbulbifer degradans
atgttaaaagccattaacaacggcgaacgctatcaactcactagccctaccgctatgccgcaaagcgcatcgtttttatggaataaaaaaatgatgatacaagtaaattgccgcggctacgccgttgcgcaatttatgcagccagaaccagccaaatacgcttacgcacccaatctggaagcaaaaacatttatgcaaccagagcaaccctattacgcgcatcaccccgggcgctttttctatataaaagatgaagagacaggcgagattttttcggcaccctacgagcctgtgcgcagccagctgaacaactttagctttaacgcaggcaagagcgatataagctggcatattgccgctttaggcattgaagtagagctatgtcttagcctgccggtggacgatgtagtagaattgtgggaactaaaaataaaaaacggcggcgcgcaacctcgtaaactcagtatttacccgtactttcctgtgggttacatgtcgtggatgaatcaatctggtgactacagccaaaccgccggcggcattattgccagctgcgtaacgccttatcaaaaagtcgccgactactttaagaataaagactttaaagataaaacgttctttcttcacgaaaccgccccagcagcatgggaagtaaaccagaaaaacttcgaaggcgaaggcgggttgcacaaccccaacgccatacaacaagaaacgctgggctgcggcaacgcattgtacgaaacgcccacagcggtattgcaataccgccgcgaacttgcagcgcaagagcagcaaacctttcgctttatttttggcccagcatttgacgagagcgaagccattgcactgcgcaataagtatttatctgccgaaggttttgccaaagcaaaaagcgaataccaaacctatataacgagcggcaaaggctgcttgcaaattaacaccccagacccagaactaaacaactttgtaaaccactggctaccgcgccaagtgttttatcacggcgatgtaaaccggttaaccaccgacccgcaaacgcgcaattatattcaagacaatatgggcatgagctacattaagcccaacattacgcggcaggcgtttttacatgccttaagccagcaggaagaaagcggtgcaatgcccgacggcattttattgcttgaaggcgccgagcttaaatacataaaccaaataccccataccgatcactgcgtttggctgccggtgtgtatgcaagcctatttggatgaaaccaatgactacgccctattagacgaaatagtaccctatgcgagtggcgagaagcgcgaaactgttgagcaacatatgcatcacgctatgcgctggcttttgcaagcacgcgacgaacgcggcctaagctttatcgcacagggcgactggtgcgaccccatgaacatggtgggctacaagggcaaaggggtatccggctggctttcagtcgctaccgcttatgcattaaacctgtgggcagatgtttgcgaacaacggcagcaaaacagttgcgccaacgaatttagacagggcgctaaagatataaacgcggcggtaaacaagcatatttgggatggcgaatggtttggccgcggcattacagatgacggcgtactgtttggcaccagcaaagataaagaaggcagaatttttctaaacccacaaagctgggcaatacttggcggcgccgccgacgaacaaaaaatcccatgcctgctagacgcagtagagcaacaactggaaaccccttacggcgtaatgatgctggcccccgcgtttaccgccatgcgcgatgacgtaggccgagttacccaaaaattcccaggctctgcagaaaacggctctgtttataatcacgcggcggtgttttatatatttagcttgttatccattggcgagagcgaacgcgcatataaactgctacgccaaatgctgcctgggccagatgaagccgatcttttacagcgcggccaactgccagtattcatacctaactattatcgcggcgcatactaccagcacccccgcaccgccggtcgctctagccagctctttaatacgggtacagtctcgtgggtttaccgctgcttaattgaaggggtattcggcttgaaaggctcgccacaaggcttagttgtacaaccgcaactgcctgtcgcctggcaaacagcagaagccgttagggaatttagaggcgcaacgtttaacgtgagctaccgcaaaagcagcgatataaaagaaatggaaatacagctaaatgaatcggtaataagtggcaacaccatctccgacatcaccgccggcgcgacctatcaattaaccgttctattacctgccacacactaa

SEQ ID NO: 49 - protein, 574 aa, Microbulbifer degradans
MKKLIKPTLSWVAGVALSLGIAQGAGAQNVQFVGNITTNGSVRNDFMDYWDQITPENEGKWGSVERSRDNYSWSGQDAAYNFARANGIPFKAHTLVWGSQYPSWINNLSNAEKAAEIEEWIRDYCNRYPATDIIDVVNEATPGHAPANYARDAFGDNWIIKSFQLARQYCPNATLVLNDYNVLIWNTNDFIAMAQPVINAGVVDALGLQAHGLESLSASQLKSTLDRIANLGLPIYISEYDVRSTNDQEQLRIMRDQFPVFYNHPSVRGITLWGYMVGATWREGTGLIRADGSHRPAMTWLMNYLENNRGGSTSSSSSSSSSSSSSSSSSSGSSSGGPSSLTVELESLSDSSNFSPFSVQSDSSAAGGQYVVWPNNGNQIVSSPSDSASGQIQVHFTLSQSADVQFQIRADLANGNDDSFYYKLDSGSWNTQNNASTSGWGTLTPATFSNVSTGSHTLHILRREDGAKLDKVTLNASVGQVSASTGSSSSSSSSSSSSSSSSSSSSSGAAVASCDGVNEYPSWTAKDWSGGDYNHANSGDYMSYQGVLYRANWYTATVPGSDSSWTRVGDCNFV

SEQ ID NO: 50 - DNA, 1725 bp, Microbulbifer degradans
atgaagaagttaattaagcctacgctatcgtgggttgcaggagttgctttgtcgctgggtattgcccagggagctggtgctcaaaatgtgcagtttgttggtaatatcactaccaatggtagtgtgcgcaacgacttcatggactactgggatcagattaccccagagaatgaaggcaagtggggctcggtggagcgcagtcgcgacaactattcatggagcggccaagatgccgcctacaattttgcccgtgccaacggcatcccatttaaagcacatactttagtatggggcagtcaatatcccagctggataaacaatttaagtaacgcggaaaaagccgctgagattgaagagtggattcgcgattactgtaaccgttacccagccaccgatattatcgatgttgtcaatgaagcaacgccgggccacgcgccagcaaattatgctcgcgatgcatttggcgacaactggataatcaagtccttccagctggcacgtcagtactgccccaatgccacgttagtgttgaacgactacaacgtacttatttggaacaccaatgattttatagcgatggcccagccggtaattaacgccggagtagtagatgctttgggtttgcaggcccacggtctggagagcctttctgcgtcgcaattaaaatcgactctggatcgtatcgccaatttgggtttgccaatttatatctctgaatacgatgttcgcagcaccaatgatcaggagcagctgcgtattatgcgtgatcaattccctgtattttacaaccacccaagtgtacgtggcataactttgtggggttatatggtgggggccacctggcgagaaggcacaggtttgattcgtgctgatggctcccatcgtccagcgatgacctggttgatgaactatctggagaacaatcgtggcggctcaacctcttcaagtagttcatcctcctctagcagttcgtcttccagtagttcttcttcgggaagttcctctggtggcccaagtagtttgacggtagagctagaatctttgtcggatagcagtaacttttcgccattctcggtacagagtgacagcagcgcagcgggcggccagtacgtggtatggcctaacaacggcaatcagattgtaagctcaccctccgatagcgccagcgggcaaattcaggtgcactttaccctgtcgcaatcggcggatgtgcaatttcagattcgtgcagacctagctaacggcaatgacgactctttttattacaagctggactcaggctcttggaatactcagaacaacgcttccacgtctggttggggcaccttaaccccagcaactttctctaatgtatccacaggatcccataccttacacattctccgcagagaagatggggcgaaactcgataaggtaactctgaatgcttcagttggtcaggtttccgctagtacaggcagtagctccagctcttccagcagctccagttcatccagcagttctagttcttcaagcagcagcggcgcggcagtcgcaagttgtgacggtgttaatgaataccccagctggacagcaaaagattggtctgggggtgactataaccacgccaatagcggtgactacatgagctatcagggtgttctatatcgagcaaactggtacaccgcaactgttcctggaagtgattcttcctggactcgagttggcgattgcaattttgtgtaa

SEQ ID NO: 51 - protein, 619 aa, Microbulbifer degradans
MIKLRQSIHGALARTVGIISISTGLVLAAQTASAACEYTVTNSWGSGFTASIRITNDTGSAVNGWAVNWQYANGNRVTNSWNATLSGNNPYSASNIGWNGGIQPGQSVEFGFQGTANGAAETPAVTGAVCATGSSSSSSSSSSSSSSSSSSSSSSSSSSSSSTSSSSSSSSSSSSGANCVEMCKWYQDAPRPLCNNQNSGWGWENNQSCIGRATCESQPSNAGGVVNSCPSSSSSSSSSSSSSSSSSSSSSSSSSSSTSSSSSSTSSTSSSSSSSSGSAANLYTLADFPIGVAVTAGNESRSFLSIAAKEATVKKHFDQITAGNIMKMSYLHPSENSYTFSQADAMVNWANSNGVSVHGHTFIWHSDYQVPNWMNNYSGNFASMMDTHVTTIADHFEGRVVSWDVVNEAIDESQSSCYRNSLFYQRLGKAYIANAFRAARAADPSVELYYNDYDTEGGNANKLNCLLQLVDDLQANNVPIDGVGFQMHVQIDWPSTSNIAAAFQAIVDRGLKVKITELDVPINNPYGSGSFPQYSTYTSQAAALQKARYKSIVKTYLTVVPAHLRGGLTVWGIWDGDSWLLDFDNRQGADDWPLLFSGPANGPYVEKEAFYGVAEALTE

SEQ ID NO: 52 - protein, 50 aa, Microbulbifer degradans
MLDELLDELELLLELELLDEELELELEELDPVAHTAPVTAGVSAAPLAVP

SEQ ID NO: 53 - protein, 103 aa, Microbulbifer degradans
MGKSAKVYKFAAEPLELELLEEVELVLDELELVDELELLDELELLDELELEELEELLELDGQLFTTPPALDGCDSHVARPIQLWLFSQPQPLFWLLHKGRGAS

SEQ ID NO: 54 - DNA, 1860 bp, Microbulbifer degradans
atgatcaagctacgtcaatctatccacggcgccttggcgcgtaccgtgggcataataagtataagcaccggacttgtactcgcagcgcaaactgcaagtgcagcctgtgaatacaccgtaaccaattcgtggggttcgggttttaccgcgagtattcgcataacaaacgataccggtagcgcagtaaacggttgggcggttaactggcaatacgctaatggcaaccgtgtaacaaattcatggaacgctacgctgtctggcaataacccttatagcgccagcaatattggttggaacggcggtattcaacctgggcagtcggtggaatttggttttcaaggcacggctaatggcgcggcagaaacaccagcggtaacgggggctgtatgtgctacagggtctagctcttccagctcaagctctagttcttcgtctagcagctctagttctagcagcagttcgagttcatcgagtagctcgtctagcacttcaagctcgtcatctagcagctcttccagttcatcgggcgcaaactgtgtagaaatgtgtaagtggtatcaagatgcgcctcgccctttatgcaataaccaaaatagtggttggggttgggaaaacaaccaaagttgtatcggccgagcaacgtgcgaatcgcaaccgtctaatgcgggtggggtggtaaatagttgtccgtctagttctagcagctcttcaagttcctctagttcgagctcgtctagcagttcaagctcgtctagcagttcaagctcgtctactagttctagttcatcaagcacaagttctacttcttcaagtagttctagctctagcggttctgctgcaaacttatataccttggcagatttccccattggcgttgctgtaactgcgggtaatgagagccgtagctttttatctattgctgcgaaagaggcaactgttaaaaaacacttcgaccaaattacagccggtaacattatgaagatgagttacttgcacccatccgaaaatagctacacctttagtcaagcggatgccatggttaactgggcaaatagcaacggcgtaagtgtgcacggccatacttttatttggcattccgattaccaagtaccaaattggatgaataattacagcggtaattttgcgtctatgatggatacccacgtaaccactattgccgatcattttgaaggccgagtagtaagctgggatgtggtaaacgaagctatcgatgagagccaatctagttgttatcgcaactctttgttttaccagcgtttaggtaaagcttatattgccaatgcgttccgcgcggcccgagcagcagaccctagcgtagagttgtattacaacgattacgataccgaaggtggcaatgccaataagttaaattgcttgttgcaattagtcgatgacttgcaagcgaacaatgtgcctatcgatggtgtgggctttcaaatgcacgtgcaaattgattggcccagcaccagcaatattgctgcggctttccaagctattgtggatcgcggcttaaaggtaaaaattactgagctggatgtgcctattaataacccttatggcagtggttcattcccgcaatattcaacttacacgtcacaagccgctgcgttgcaaaaggcgcgttataaatccattgtaaaaacctacttgactgttgtgccagcgcatttgcgcgggggcttaaccgtatggggtatatgggatggtgatagctggttgttagattttgataatcgtcaaggcgctgatgattggccgctattatttagtggcccagctaatggcccctatgtagaaaaagaagcattctatggcgtggcagaggcgcttacagaatag

SEQ ID NO: 55 - protein, 470 aa, Microbulbifer degradans
  VARIANT (301)..(457): Wherein Xaa is any amino acid.
MNCTRRNIVKAGLLGSAFVALPAVARALPGLATKFRDQFYVGTAVSARSLNTPSGAFAATVAHQFNALTAENAMKPALLQPQMGEWRWQDADAIVRFAEQHQMLMHGHTLVWHSQTPDWFFQNKQGEPADKATLYRRQEEYINAVVGRYKGRVHSWDVVNEAEDEGKGWRKSHWYNICGPEFMERAFRLAHAADPKAHLCYNDYNMHLPQKREFLVKLFKDYIKRGVPIHGVGLQGHVGLDYPSLDELEKTIVAMADLGLKVHITELDVDVLPAPWQLASADISTKFEYDKSLNPYVDGLXXXXXXXXXXXXXXXXXXXXXXXXXXXXXXXXXXXXXXXXXXXXXXXXXXXXXXXXXXXXXXXXXXXXXXXXXXXXXXXXXXXXXXXXXXXXXXXXXXXXXXXXXXXXXXXXXXXXXXXXXXXXXXXXXXXXXXXXXXXXXXXXXXXXXXXXXXXXXTMYKMRLPAKILA

SEQ ID NO: 56 - DNA, 1413 bp, Microbulbifer degradans
  misc_feature (902)..(1369): Wherein n is a or c or g or t.
gtgaattgtacgcgtaggaatatagtaaaagcaggccttcttggctcggcattcgtcgccctgcctgccgtggcgcgcgcgctgcctggattggccacgaaatttcgcgatcagttttacgtgggcactgcggttagtgcgcgctcacttaatacgcccagcggcgcgtttgcagccactgtcgcgcatcaattcaatgcactaaccgctgaaaacgccatgaagcccgccttacttcaaccacaaatgggggagtggcgctggcaggatgccgatgccattgtgagatttgccgagcagcatcagatgctaatgcatggtcacacccttgtgtggcattcgcaaacgccagattggttcttccaaaacaagcagggcgaaccggcagacaaagcaaccctataccgcaggcaagaggagtatatcaatgccgtagttgggcgctataaagggcgggtacactcgtgggatgtggtgaatgaagcagaagatgagggtaaaggctggcgcaagagccactggtataacatttgtgggccagagtttatggaacgagcctttcgcttagctcacgcagcggacccaaaagcacacttatgttacaacgattacaatatgcacttgccgcaaaagcgcgaatttttggttaagttattcaaagactacattaagcgcggcgtgcctattcacggcgtagggttgcaggggcatgtgggcttagactacccctcgctggacgagttggaaaaaaccatcgtggccatggccgatttaggtctaaaagtacacattacagaattggatgtagatgtattacccgcgccatggcaactagctagcgcagatataagtactaaattcgagtacgacaaaagcttaaacccgtacgttgatggtttgcnnnnnnnnnnnnnnnnnnnnnnnnnnnnnnnnnnnnnnnnnnnnnnnnnnnnnnnnnnnnnnnnnnnnnnnnnnnnnnnnnnnnnnnnnnnnnnnnnnnnnnnnnnnnnnnnnnnnnnnnnnnnnnnnnnnnnnnnnnnnnnnnnnnnnnnnnnnnnnnnnnnnnnnnnnnnnnnnnnnnnnnnnnnnnnnnnnnnnnnnnnnnnnnnnnnnnnnnnnnnnnnnnnnnnnnnnnnnnnnnnnnnnnnnnnnnnnnnnnnnnnnnnnnnnnnnnnnnnnnnnnnnnnnnnnnnnnnnnnnnnnnnnnnnnnnnnnnnnnnnnnnnnnnnnnnnnnnnnnnnnnnnnnnnnnnnnnnnnnnnnnnnnnnnnnnnnnnnnnnnnnnnnnnnnnnnnnnnnnnnnnnnnnnnnnnnnnnnnnnnnnnnnnnnnnnnnnnnnnnnnnnnnnnnnnnnnnnnnnnnnnnnnnnntgactatgtacaaaatgcgcttgcccgcgaaaatattagcttaa

SEQ ID NO: 57 - protein, 1186 aa, Microbulbifer degradans
MLRSTQSTPIVKRKISAYVGWGLCVLLSVCTASISWAGNPIVSHVYTADPAARVINGRAYVMVTHDQDNQNDYGGLIDYYLFSSDDMVNWQDHGIVWNSRTDSSWASLAYAPDFIERNGKYYLYFPNGANSIGVAVADSPEGPYTDPLGRPLVDRNTPNANVDWLFDPGVFIDDDGQAFLYFGGGADGTARVIRLNNDMISTSGAAISIDVPNFFEALYMHKRNGIYYLSYSTNPSAGMSIDYMTSNNPTSGFTHRGTILPNPWENNSNNNHQSIIEFNNEWYIFYHNRAVANTRGDSTFSRSINVDRLYYNSDGSIREVNASSIGVPAVRNVNAFSINQAETFDQEGGIETEPSSEGTLNIQMGPGDWVKVANVDFGNGATQFNARVASAIDNSKLEIILGSLSNTPHASLEITNTGGWQNWQTQSTSFNAITGVHDVYLRGTSGHNLNWFEFEGENNGGSSQLTVELEDLASQSLFAPLSVRSDNMANNGAYIEWSNDGSNQILSVASEQSQGQISVPFTLSQASDVEFNVRVNLANGNDDSFYYKLNSNSWQTFNNQATTGWQVLTPNTFTGLSPGNHILTLLRREDGAKLDTLTLVASAGSIQTNNSSSSSTSSSSSTTSSSSTSSSSSSGAAPTGNVTYSINVTNDWQSGYCAELTVTNNTNNALQWQASVSMSDSVDSMWNASWSQSGNILNVSGVEWNNTLQAGQSQSGIGFCATRASSSSSSSTTSSTSGSTSSSSSSGGYTVPSNNFAVNGGVENNLQSWGATAGSVTRSTEQRYSGNASARITNRAENWHGLTFSVGELTQGNLYEVAVWVKLAAGSADTPITLTAKRQNDSDDSTYNEYTGIVTTIANDSEWVLLHGQYTQTGTAFEHFIIESESDSVSFYADEFSIGGEVTPKNEVGFFVGNITTNGNVRNDFTQYWDQLTPENEGKWGSVERTRDVYDWSGLDRAYNYAKQNNIPFKQHTMVWGSQQPNWIDSLSPAEQAAEIEEWIRDYCARYPDTEMIDVVNEATLGHAPANYAASAFGNNWIIRSFELTRQYCPNSILILNDYNVLSWNTQEFIQMATPAVNAGVVDAIGLQAHGLADWSLSDLETKLNQVAALGLPIYISEYDIEKTNDQEQLRVMQTQFPLFYNHPSVKGITIWGYVVGATWRDGTGLLHSNGTPRPALTWLMDYLNR

SEQ ID NO: 58 - DNA, 3561 bp, Microbulbifer degradans
atgttgcgaagcacccaatcaacacccattgttaagcgaaagatttctgcctatgtaggttggggtctgtgcgtgttacttagcgtctgcacggcctcgatctcttgggcaggtaaccctattgtgtctcatgtatataccgcagaccctgctgcacgggtaataaacggaagagcctatgtaatggttacccacgatcaggataaccaaaatgattacggtggtttgattgattactacctgttctcatcggacgatatggttaattggcaagatcacggtattgtgtggaattctcgaacagacagtagttgggccagtcttgcttacgccccagattttatcgagcgcaatggaaagtactacctgtactttcccaacggcgcaaactctattggtgtcgctgtggccgatagccctgagggcccctatactgatccactcggtaggccgctggttgaccgcaatacccccaatgccaatgttgactggctgttcgatcccggtgtatttattgatgacgacggacaagcctttttgtactttggtggaggcgctgatggaaccgcgcgcgttattcgtttaaataacgacatgataagtaccagtggtgcagccataagtattgacgtacctaacttctttgaagcgctatacatgcataagcgcaacggcatttactacttatcctactcgaccaaccccagcgcggggatgagcatagattacatgacgagtaataaccctacctcagggttcacccatcgcggcaccattttgcccaacccttgggaaaataattccaataacaaccaccagtcaattattgaatttaataacgaatggtacattttttaccacaatagagctgtcgcaaatacgcggggcgatagtaccttttcccgctctattaacgtggatcgtctttactacaattccgacggcagtattcgagaagtaaatgccagttcaataggtgtacccgcggtacgtaatgttaatgctttttccataaaccaagcagaaacattcgatcaagaaggtggcatagaaactgagccgtcttctgaaggtaccttgaatattcagatgggcccaggagattgggtaaaagttgctaacgtcgattttggtaacggcgccacacaatttaacgctcgagttgctagcgcaatcgataattcaaagctggaaattattttaggcagtctcagtaataccccgcatgcctcgctcgaaattaccaacacaggcgggtggcaaaattggcaaacacaaagcacaagttttaatgcaataactggtgttcacgatgtatacctgcgcggtacttctgggcacaacctaaattggtttgaatttgaaggcgaaaataatggaggaagcagtcagctaacggttgagttggaagacttggcttcgcaatctctttttgctccccttagcgtacgctccgataacatggctaataacggcgcttacattgaatggagtaatgatgggagcaatcagattctcagtgtggccagcgagcaatcgcaaggccaaatcagtgtcccatttactctatcgcaagcttccgatgtcgaatttaacgtacgcgtgaatcttgctaatggcaatgatgattcgttttattacaagctaaacagtaatagctggcagacttttaataatcaagctaccactggttggcaggtgctcacgcccaacaccttcactggtcttagccctgggaatcacattcttactctacttcggcgtgaagatggcgccaaattagataccctcacgttggtagcctccgcgggcagtattcaaaccaataacagctcatcaagttctacctccagcagtagttcaacgactagctcaagttcaaccagctcgagtagttcctctggcgccgcgccaactggtaacgttacttactctataaatgttactaacgactggcaaagtggttattgtgcggagcttaccgttaccaataacacgaacaacgctctgcagtggcaagctagtgtttctatgagcgatagtgtcgacagtatgtggaatgctagctggtcgcagagcgggaacatacttaacgtaagcggggtagagtggaataatacgttgcaagcagggcaaagccagagtggcataggattttgtgctacacgtgccagctcgtcttcctccagctctacaacaagttctacttccggttccacatcaagctctagttcatcgggaggctataccgttccgagtaataatttcgcagtcaatggtggtgtagaaaacaacctgcagagctggggcgcaacggcgggttcagtaacacgttctactgaacaacgttatagcggaaacgcaagcgcgcgtataacaaatcgagcagaaaactggcacggtttgacgttcagtgttggtgagcttacgcaaggcaacctgtacgaagttgcggtgtgggtaaaacttgcggcaggcagtgcggacacacctattacgcttaccgccaaacgacaaaatgatagcgacgattccacttataacgaatataccggcatagtcacgaccattgctaacgattctgaatgggtgctgctgcacgggcaatacactcaaactggcacagcgtttgagcattttattatcgagtcagaaagcgatagcgtaagtttttatgccgatgagttttctattggtggagaggtcacgcccaaaaacgaagtgggattttttgtgggtaacattaccactaatggcaatgtgcgcaatgattttactcagtactgggatcaactaacaccagaaaatgaaggaaagtggggttcggtagaacgcactcgtgatgtgtatgattggagtggactagacagagcctataactacgccaaacaaaataatattccgtttaaacagcatactatggtgtggggtagccaacagcccaactggattgattcgctcagcccagcagaacaggctgcagagatagaggagtggataagagattattgtgcgcgctatcctgatactgaaatgattgatgtggtaaacgaagcaacgctgggccatgctcctgctaactacgcggcgagtgcgtttggcaataattggatcattcgttcgttcgagcttactcgtcaatattgtcctaacagcattttaatattgaacgattacaatgttttaagttggaacactcaagagtttatccagatggctactccggctgtcaatgcaggcgttgtagatgcaattggattacaagcacacggcttagcggattggtctttaagtgatttagaaaccaaactaaaccaggttgcggcattgggtttacccatttatatatccgaatacgatatagaaaaaactaacgaccaagaacagctgcgcgtaatgcaaactcagttcccgctgttttataaccatccatcggtgaaaggcattactatttgggggtatgttgttggggctacttggcgcgatgggacgggattgttgcacagtaacggaacacccagaccggcacttacttggttaatggattacttgaatagatag

SEQ ID NO: 59 - protein, 670 aa, Microbulbifer degradans
MVIITMKAGLLLRILLTVLALNMLAACGGSSSNTKEPVTQPEPEPEQQPEPEPEPEPEPEPEPEPEPEPEPEPEPEMEPQPEPQAPPAGGVSIIDTNPNNASFWAGSNNGDVGSRAVIDVDHPEFSQATRITVSNPASDYWNGQLSFPLNASVAAGDVVLVRLYMRSVENTYESGASFTTVFIEDNIDFTKFLNREITAAQDWVEYYLPAEITDNHATGEVGLRIGFGAGPRAQVFDIGGVELLHYTNTDISAMPSTRPSYEGREPDAAWRTAAAERIEQHRKGDFELTVVDDGNPIANATIDVDFQKHAYHFGSVTVGHLLMGTSEDSAIYREKVLELFNQSGPENDLKWGPWEGEWGNNFNQTQTLNGLQWLRDNGLYTRGHVMVWPSKRNLPNLMQQYLPEGDPASANPEAKQVVLDHIDDIATATANYLDEWDVLNEPYDNHYLMDAFGDSVMVDWFNRARTNLPAHGLYINDYSILSAGGRNFAHQEHYTNTIQYLVDNNAPITGIGLQSHFGDSPTAITRIYEIIDQYSTAFPQLDIRATEFDVSTTDEDLQADFTRDFLTIFFSHPKTVGVQLWGFWANAHWYPNAALYDADWREKPNALAWKEQIFNEWWNDFDGTTNAQGKFDERGFYGDYQVTVTVGEEQQIFTFSLVKGGEQNFSFEWQ

SEQ ID NO: 60 - DNA, 2013 bp, Microbulbifer degradans
atggtcataataactatgaaagccggtttacttctacgcatcctattaactgtactcgcgctcaatatgcttgccgcatgtggcggtagttctagcaataccaaagaacccgttacccagccggaaccagagccagagcagcagccagaaccagaaccagagccagagccagagccagagccagaaccagagccagaaccagagccagaaccagagccagagcctgaaatggaaccgcagccagagccacaagcgccgcctgcaggtggtgtatctatcattgataccaaccccaacaatgcatcgttttgggcaggctcaaacaatggtgatgtgggcagtagggctgttatagatgtcgatcaccccgaatttagccaagcgacgcgcataaccgtaagcaaccccgctagcgactattggaatggtcagctctccttcccgcttaatgcgagtgtggcggcgggggatgtagtattagtgcgtttgtacatgcgctcggtggagaatacttacgaatcgggtgctagttttactaccgtatttattgaagacaacatcgactttactaaatttttaaaccgcgaaataaccgccgcgcaagattgggtagagtattacctacccgcagaaattaccgataaccatgcaaccggtgaagtgggcttgcgcattggctttggcgctggccctagggcgcaggtgtttgatattggcggtgtagagctattgcattacaccaatactgatataagcgctatgcctagtacacgcccaagttacgaaggccgcgagccagatgccgcatggcgtacagcggcggcagagcgaattgagcagcaccgcaaaggcgactttgagctaacagtagtggacgatggcaaccctatcgccaatgccaccatagatgtagattttcaaaaacacgcctatcattttggctcggtaactgttggccatctattgatgggcaccagtgaagatagcgccatttaccgcgaaaaagtgctcgagctatttaaccaaagtggcccagaaaacgatttaaagtggggcccatgggaaggcgagtggggcaacaattttaaccaaactcaaaccctaaacggcttgcagtggctgcgcgataacggcctgtacacacgtggccatgtaatggtttggccttctaagcgcaacttgccaaacttaatgcagcaatatttaccagaaggcgaccccgccagcgccaacccagaagcaaaacaagtggtgctggatcacatcgatgatatagcaaccgcaacagctaattatttagatgagtgggatgtactaaacgagccttacgacaaccactatttaatggatgcctttggcgatagtgtaatggtggattggtttaatcgcgcgcgtactaacctgcctgcgcacggtttgtacataaacgattacagtattttatctgcgggcgggcgcaattttgctcaccaagaacactacaccaacacgattcaatatttggtcgataacaacgcacccatcaccggtataggtttgcaaagtcactttggcgactcgcctacagccattacgcgtatttacgaaattattgatcaatacagtaccgcgtttccgcagttagatattcgcgcaacggaatttgacgtaagtacaacagatgaagacctgcaggcagattttacccgcgacttcttaacgatattctttagccaccctaaaacagtgggtgtgcagttgtggggtttttgggcaaatgcacattggtaccctaatgcagcgctttatgatgccgattggcgagaaaagcccaatgcactagcttggaaagagcaaatttttaacgagtggtggaacgactttgacggcacgaccaacgcacagggtaaatttgatgaacgcggtttttacggcgattaccaagtaactgtaaccgtaggtgaagagcagcaaatttttacctttagcctagttaaaggcggcgaacaaaactttagttttgagtggcaatag

SEQ ID NO: 61 - protein, 275 aa, Microbulbifer degradans
MNIKTFFPALIASVFLLINASTGYAASITKTLCNPADSDNGYGAGTFNGKFYSWFELSQEDITDCDTKIGFYNETNRHFRVEWNVAQSWGEDAIGGMGWSSGSRDRKIGYNVGQLTTNSSIQKALVAMYGWSCSTSGGNQISQEYYVVDTWDGGKFVPWDENANNGNGAPAQSVGTVSANGATYDVYKVRRNGAQYCFNGSSRSFDQFWSVRRTPRAINGNRNMDFRPHANRWDNSDLGFKVDGLSSGYQILAVEIFGDANLRHKGAADITLWPR

SEQ ID NO: 62 - DNA, 828 bp, Microbulbifer degradans
atgaacataaaaacattcttccccgcacttattgcaagtgtatttttattaattaacgccagcactggctatgcagcaagcattaccaaaacgctttgcaacccagccgattccgataacggctacggtgcaggaaccttcaatggcaaattttattcttggtttgagttaagccaagaagacattaccgattgcgatacaaaaattggtttttacaacgaaaccaatcgacactttagggtggagtggaatgttgctcaatcttggggagaagatgcaattggtggaatgggttggagctctggctcgagagatagaaaaataggttacaacgttggccaacttacaactaattcttctattcaaaaagcattggttgctatgtatggctggtcttgctctaccagtggtggcaaccaaatatcacaagaatattatgtagtggatacatgggacggcggcaagtttgtgccttgggatgaaaacgcaaataatggcaacggtgctccagcacagagtgtaggaacagttagcgctaatggtgcaacatacgatgtttataaggttcgccgcaacggtgcgcaatattgttttaatggcagcagccgctcgtttgatcagttttggagtgtgcgtagaacgcctagagcgattaacggcaaccgtaatatggattttcgcccgcacgccaaccgctgggacaacagtgacctaggttttaaagttgacgggttaagcagcggttaccaaattttagcggttgaaatatttggtgatgcgaacctaagacataaaggtgcagcagatattactttatggccacgctaa

SEQ ID NO: 63 - protein, 767 aa, Microbulbifer degradans
MKSINVCGRRLKQALAAIATAAATLWFTPVDAQTLTSNQTGTHGGYYYSFWTDSAGTVSMTLGNGGNYSSSWSNTGNWVGGKGWQTGGRKTVNYSGTFNPSGNGYLTLYGWTQNPLIEYYIIESWGTYRPGESGTYYGTVNTDGGTYDIYRTQRVNQPSIEGTATFYQYWSVRQQKRVGGTITTGNHFDAWASHGLNLGTHNYMVMATEGYQSSGNSNITVSEGSGSSSTSSSSSSTGGPSGTNIVVRAQGVSGQEHINLIIGGNVVADWTLSTSMQDYTYTGNAAGDLQVEYDNDASGRDVELDYVYVNGEIRQAEDMEYNTATYSGECGGGSYSQTMHCSGVIGFGDTSDCFSGNCNGASSTSSSSSSSSTSSSTSSGGNNNSGITVRARGTNGDEHINLIVGGNIVGNWTLTTSNQNYVYNGNASGDVEVQFDNDANGRDVILDYVIVNGETRQAEDMEYNTATYSGSCGGGSYSETMHCSGEIGFGHTDDCFSGNCTSSSGTTGSSGGTSSNNGTSSCNGYVGITFDDGPGNNTATLINLLQQNNLTPVTWFNTGQNIAANTGQFAQQKSVGEIQNHSYTHSHMLNWSYQQVRDELASTNQAIVNAGGATPTLFRPPYGETNSTINQAAQDLGLRVITWDVDSRDWDGASASAIANSANQLQNGQVILMHDASYNNTNGAISQFAANLRARGLCAGKIDPSTGRAVAPSTNTGGNTGSNTGNGGNGGMCNWYGTSIPLCQTTNDGWGWENSQSCVSQNTCNSQ

SEQ ID NO: 64 - DNA, 2304 bp, Microbulbifer degradans
atgaagtcaatcaatgtatgcggcagacgcctcaagcaagccctcgcagcaatagcaaccgctgcagcaactctctggtttacgccagtggatgcacaaaccttaacctcaaaccaaactggtactcatggtggttactactattccttctggaccgacagtgctggcactgtttctatgacactcggcaatggcggcaattacagttcatcgtggagcaataccggtaactgggtgggaggtaaaggctggcaaacggggggacgcaaaaccgtaaactattccggtacgtttaacccctcgggcaatggttatttaaccctctacggttggacccaaaacccactcattgaatactacatcattgaaagctggggcacctatcgcccaggtgaaagcggaacctactacggcaccgtcaacaccgatggcggcacttacgatatttatcgcacccaacgcgttaaccaaccgtcaattgaaggcactgcaacgttttatcagtactggagtgttaggcaacaaaaacgcgtaggcggcaccataacaaccggcaaccattttgatgcgtgggcgagtcatggccttaacctaggcacacacaattacatggtaatggccaccgaaggttatcaaagtagcggcaactccaatattaccgttagcgaaggcagcggttcgagcagtactagttcgagtagctctagcaccggtggcccaagtggtaccaatattgttgtgcgcgcacaaggtgtaagcggccaagaacatatcaatttaattattggcggtaacgtagtggcagactggacgctttcaaccagcatgcaagattacacctacaccggtaatgccgcaggcgacctgcaagtagaatacgacaacgatgctagtggtcgcgatgtagagctagactatgtgtatgtgaatggcgaaattcgtcaagcagaagacatggaatacaacaccgcaacttacagtggtgaatgtggtggcggttcctattcgcaaaccatgcactgcagcggtgtaattggctttggcgataccagtgattgttttagcggcaactgtaatggtgcatcttctacaagttctagttcgtctagtagctcaaccagctctagcacaagctctggcggtaacaataacagcggcattactgttcgcgcacgcggtaccaatggcgatgaacatatcaaccttattgttggcggcaatatagtaggcaattggacgctcaccaccagcaaccaaaattatgtttacaacggcaatgcatctggtgatgtagaagtacaattcgacaacgatgccaacggtcgcgatgttattctcgattacgtaatagtaaatggcgaaactcgccaagcggaagatatggaatacaacacggcgacctacagcggttcctgtggtggtggctcctattcggaaacaatgcactgcagcggcgaaattggttttggtcacaccgacgattgctttagtggaaattgcactagcagcagcggcacaaccggtagctctggaggaacatcaagcaataacggtacaagtagctgtaacggttatgtaggtattaccttcgatgatggcccaggcaataacaccgctacattaataaacttactacaacaaaataacttaaccccagtaacttggtttaacacaggccaaaatattgctgccaatacaggtcagtttgcccagcaaaaaagtgttggtgaaattcaaaaccacagctacacccattcccatatgcttaattggagctatcaacaagttcgcgacgaactcgccagcaccaatcaagctattgtgaatgctgggggcgcaacgccaactctattccgtccgccttatggcgaaacaaactccaccattaatcaagcggcacaagatttaggcctgcgcgtaataacctgggatgtagattcgcgcgattgggatggcgcaagcgcttcagctattgccaactcggctaatcagttgcaaaacggccaagtaattttgatgcacgatgccagctacaacaataccaacggagccatatcacaatttgcagccaatctaagagcaagagggctatgtgcaggtaaaatagacccaagcactggccgcgcagttgcaccaagcacaaataccggcggcaacactggcagcaatacaggaaatggcggtaatggcggcatgtgtaactggtacggcaccagcattccattatgccaaactaccaacgacggttggggctgggaaaactcacaaagctgcgtttcgcaaaatacctgtaactcacaataa

SEQ ID NO: 65 - protein, 360 aa, Microbulbifer degradans
MCLKINRCWVFVWLCICATTAHSETYVPADNDQYLYTGRIDFSDIKAPSLSWPGTSIKANFTGEHLEVVLDDQNGKNFFNVIIDGNDRFPYVLEAKQGEHRYLISSALSKGKHSVEIYKRTEGEEGATLFKGLWLADDSYLLKPPKRPKRRIEIYGDSITSGMGNEGADNGADHLGSEKNNYLAYGAITARNLNAELHTISQSGIGVMVSWFPFIMPQFYNQLSAVGNNDSIWDFKQWTPHVVVINLMQNDSWLIDREKRLTPIPADAQRIAHYQAFVQSIRAEYPKAQIICALGSMDATANEKWPNYVREAVKNMQDNGDNKIDTIFFEYIGYGQHPRVAQHNANADKLTKFIKKKMKW

SEQ ID NO: 66 - DNA, 1083 bp, Microbulbifer degradans
atgtgcctaaaaataaaccggtgctgggtgtttgtttggttgtgtatttgcgcaactactgcccatagtgaaacctacgtacccgcagataacgaccaatacctttataccggccgtatagattttagcgatataaaagcaccctcgctaagctggcccggcacaagtataaaagccaactttaccggcgaacatttagaggtagtgttagacgatcaaaacggtaagaatttttttaatgtgattatcgacggtaacgatcgatttccttatgtgctagaagctaaacaaggtgagcatcgatatttaatttcttctgcgctaagcaagggcaagcacagcgtagaaatttataaacgtacagaaggcgaagagggcgcaacgctatttaaagggctttggttagccgatgatagttatttattaaaaccccctaaacgcccaaaacgcagaatagaaatttatggtgactcaattacaagcggtatgggtaacgaaggcgcagataacggcgccgaccatttgggctccgaaaaaaataattaccttgcctatggggctattaccgcacgcaatttaaacgccgagctacataccatttcgcaaagcggtattggggtaatggtaagttggtttccgtttattatgccgcagttttacaaccagctaagtgctgttggtaataatgattccatatgggactttaaacaatggacgccccatgtagttgtaataaacctaatgcaaaacgatagctggctaatagatagagaaaagcgccttacgccaattcctgcagatgcacaacgcatagcccattatcaagcgtttgtgcaaagcattcgtgccgaataccccaaggcgcaaataatatgcgcactgggcagtatggatgcaaccgcaaacgaaaaatggccaaactacgtgcgcgaagctgtaaaaaatatgcaagataatggcgataataaaatcgatactattttctttgaatacatcggctacggccaacacccgcgcgtagcgcaacacaatgcgaatgcagataagttaactaaatttattaagaaaaaaatgaaatggtag

SEQ ID NO: 67 - protein, 973 aa, Microbulbifer degradans
MNYYLNKKRLGQLLTGAAIIPVLYACGSQEKNVEPATVNWHKTSDGVVVSLQDSEAKKVRLQVINDRIVRVTATPQQDFNNLPNTLMVVAKPEQTAFEVKQNDASVVLSTADLSAEVSLVTGVVSFKDEHGKVLTTEVDRGNFGAVTRDPGVVDADSFAIRQQFTSDENEGYYGLGQQQDGEVNYAGDNVELTTYNLEISIPYVVSSKDYALLWNNTSISRLGDPNPPEPLKEGFKLFDANGNPGGLTARYFDGDKLLLERVEADLDYQFLAQGSNRTTPMPDETADAKNLRIEWEGSIESDTNGVHELKMYSSGYAKLYLNGELVLDRWRMNWNPWYHNTKLEMQAGKKVALKLDWQVDGGYMRIKQHKPLPVAEQGRLSIASDTAKAIDYYFVVGDNKDELVSGYRTLTGKAVMLPKWVFGFWQSRERYKTQDEIIDALQEYRDRKIPIDNIVLDWSYWPQDAWGSHDFDEQFFPDPSALVDKVHELNGNIMISVWPKFYPTTDNYKALNAKGCMFNKNIEQKNLDWIGEGYLNGFYDAYNPECREMFWAQIRDKINVHGFDAWWLDAVEPDIHSNLSFEHRKDLMTPNALGTGAEVFNAYALPHAETVYQGERRDDGDKRAFILTRSGFAGIQRTGSAIWSGDVVSRWSDLKEQIAAGVGVGISGMPYWTFDIGGFTPEDRYRYSAKGSVGHFSMMNESEVPEWQEINLRWFQFGTFVPLFRSHGQNPYREIYNIADKGTEVYDSMVWYTKTRYRLMPYIYSLVGDAHHKDGTFMRALVMDFPSDLNVRDINDQYMFGPALLVNPVSEFKARSRDVYLPAGADWYDFYTGVKHTGGKTIKADAPLAKMPIFVKAGSIIPTGVEIQHVYDKPDAPYTLNVYTGANGSFEIYEDDGKTYAYEQGAWARIPVSYNDKTGELTIGDRVGSFEGMTKEREFRVRWISAKRDDAANFDTGVAKAVTYTGKAITIKR

SEQ ID NO: 68 - DNA, 2922 bp, Microbulbifer degradans
gtgaattattatttaaacaaaaagcgactggggcaattgctcaccggcgcggccattattcccgtgctatatgcatgtggctcacaggaaaaaaacgtagagcctgcaacggttaattggcataaaacaagcgacggcgtcgttgtaagcttgcaagatagcgaagcaaaaaaagtgcgcttgcaagtcattaacgatcggatagtacgtgttaccgctacgccacagcaggatttcaacaacctgccaaatacgcttatggtggtggccaagcccgagcaaacggcgtttgaagttaaacaaaacgatgcatctgttgtgttatcaacggcagatctatctgccgaagtgtcattagtaactggtgttgtaagttttaaagatgagcacggcaaggtgcttacaacagaagttgatcgcggcaattttggggcggtaacccgcgacccaggtgtggtggacgccgattcatttgctattcgccaacagtttacaagcgacgaaaatgaaggctactacggtttaggtcagcagcaggatggcgaagtaaactacgctggcgataacgtagagttaacaacttacaacttagaaatttctataccttatgttgtatcaagcaaagattacgcgctgctatggaacaatacctcaatttctcgtttgggcgaccccaatccacccgagccactaaaagagggctttaaactctttgacgctaatggtaaccccggcgggctaaccgcacgttattttgatggcgataaattactgctcgagcgtgtagaggccgatttagattatcaatttttagcgcaaggtagtaatcgcactacgcccatgcctgatgaaaccgctgatgcaaaaaatctgcgtattgaatgggaaggtagtatcgaatccgataccaacggtgtgcacgagttaaaaatgtattccagtggctacgctaaattgtatttgaatggcgagttagtgttagatcgctggcgtatgaactggaacccttggtatcacaacaccaagttagaaatgcaggccggtaaaaaagttgcattaaagttagattggcaagtagatggtggttatatgcgcataaaacagcataaaccactgccggtagcagagcagggacgtttgtctattgcttccgataccgcgaaagccattgattactactttgtagttggcgataacaaggatgagttggtgtctggctaccgtacgctcacaggtaaagcagtgatgctacctaagtgggtgtttggtttttggcaaagccgcgagcgctataaaacacaagatgaaattatcgacgccttgcaagaataccgcgatcgtaaaattcctatcgataacattgtattagattggagttattggcctcaggatgcatggggtagtcatgatttcgacgagcaatttttccccgacccatctgcactagtagataaagtacacgagctaaacggcaatattatgatttccgtatggcctaagttttaccctacaaccgacaactacaaagcgctaaacgctaaaggttgtatgtttaataaaaacatcgagcagaaaaacctcgattggattggcgagggttacctaaatggcttttacgatgcctataacccagagtgccgtgaaatgttttgggcgcaaattcgcgataagatcaatgtgcacggtttcgatgcttggtggttagatgcggtagagccagatatccattccaacctttcttttgagcaccgcaaagatttaatgacacccaatgcactcggcaccggtgccgaagtgtttaacgcttacgctttgccgcacgcagaaactgtttaccaaggcgagcgtagagatgacggtgacaagcgcgcatttattctaacgcgttctgggtttgccggtattcagcgcaccggttcggctatttggagtggcgatgtggtatcgcgctggtccgacttaaaagaacaaattgcagcaggtgtgggcgtgggcatttctggtatgccgtattggacgttcgatatcggtggctttactccagaagatcgctaccgttatagcgccaaaggttctgttggtcatttctctatgatgaacgaatcggaagtgcctgaatggcaagaaatcaatctgcgttggttccaatttggtacctttgtgccgctgtttaggtcccacggccaaaacccatatcgcgaaatatataacatcgccgataaaggcaccgaggtatacgacagcatggtgtggtacaccaaaactcgctatcgcttaatgccttatatttattcgttagttggcgatgctcaccacaaagacggcacctttatgcgcgctctggtgatggatttccctagcgaccttaatgtgcgcgatattaacgaccagtatatgtttggccccgcgctactcgtaaaccctgtgtcggaatttaaagcgcgttcacgggatgtgtatctacctgcgggcgcagattggtacgatttctatacaggtgtgaagcacacaggtggtaaaaccattaaggccgatgcaccgcttgccaaaatgcctatttttgttaaggccggctctattattccaacaggtgtagaaatccagcatgtgtacgataagcccgatgctccttacacccttaacgtgtataccggtgcgaatggcagcttcgaaatttatgaagatgacggcaaaacctacgcttacgagcaaggggcttgggcgcgcattcccgtttcgtacaacgataaaaccggtgagctaaccattggcgatcgcgtaggtagctttgagggaatgaccaaagagcgcgaattccgcgtgcgctggatatctgccaagcgagacgatgccgccaatttcgatacaggtgtggccaaagccgttacctatacgggtaaggcaataaccattaagcgctaa

SEQ ID NO: 69 - protein, 893 aa, Microbulbifer degradans
MNKHFLVGVITLGVILQGLTACSKSAAPNANQPQDTAASTATYPFRDASLSVDARVDDLVSRLTTTEKIAQMFNDTPAIERLGIPAYNWWNESLHGVARAGKATVYPQAIGLASTFDEDLMLRVATSISDEGRAKYHDFLSKDVRTIYGGLTFWSPNINIFRDPRWGRGQETYGEDPFLTGRMAINFVKGIQGENDNSDYLKAVATIKHYAVHSGPEKTRHSDDYHPTRKDLFETYLPAFRMAIAETNVQSLMCAYNRVDGAPACGNNELMQEILRGDMGFNGYVVSDCGAIADFYESRSHHVVDSPAEAAAWAVKSGTDLNCGDSHGNTYTNLHYALQQGLITEDYIDIAVKRLFKARIKLGMFDEQDRVPYSEIGMDVVGSPKHLALTQEAAEKSIVLLKNNGVLPLKAGVKVAVIGPNAVDEDVLVGNYHGVPVKPVLPLEGIVNRVGEANVFYAPGSAQIADIYSHYEPISAENFYHKDANGNLAAGLKAEYYADYYNAAEINDDTFSATPALNRIDADINFSWPVSPIDNSLDDEFSAVWTGILKPKKSGSYRFSGTVALAINGKPVNGAVNLKAGESYNIKAIFGVQKWWPVNAIHPYGKLTWLDESRDLEEEALAAARKADVIIFMGGIDAHLEGEEMPLELDGFTHGDRTHINLPKVQTNLLKQLKATGKPVVMVNFSGSAMALNWESEKLDAILQAFYPGEATGTALANILWGDVSPSGRLPVTFYKGVDDLPAFNDYHMENRTYKFYRGEPLYAFGHGLGYVDFAYNNLVVANTAEAGKALPIAVSVTNTGKMQAEDVAQVYISLLDAPANTPIRDLKAFKRTKLAAGESTELEFNLPARVLTYIDDNGKTQTYTGRVEVTVGSGQKGYVKENAIAVATINVQ

SEQ ID NO: 70 - DNA, 2682 bp, Microbulbifer degradans
atgaataaacactttttagtaggtgtaattacgttaggggtaattctgcaggggctaactgcatgtagcaaaagcgctgcacctaatgccaatcaaccgcaagataccgcagctagtacggctacctacccgtttagggatgcaagcttaagtgtagatgcccgcgtagacgacttggtatcgcgtttaaccacaaccgaaaaaattgcccaaatgtttaacgatacgcccgcaatcgagcgattgggtattcccgcctacaattggtggaacgaatcgttgcacggtgtggcccgtgcgggtaaagcaacggtatacccgcaggcaataggcttagcgtctacatttgatgaagacttaatgttgcgcgtggctacttctatttctgatgaggggcgcgctaagtatcacgacttcctatcgaaagacgtgcgcaccatatacggcgggcttaccttttggtcgccaaatattaatatcttccgcgacccgcgttggggcagggggcaagaaacctacggtgaagacccgttcttaacggggcgtatggccattaattttgttaagggtattcaaggcgaaaacgacaacagcgattacctaaaagccgtagcgacaattaagcactatgccgtacacagcggccccgaaaaaacgcgtcattcggatgactaccatccaacccgtaaagatttattcgaaacctatttgcctgcatttcgcatggcaatagcagagactaacgtgcaatcgttaatgtgtgcctacaaccgtgtagatggggcacctgcctgtggcaataatgaattaatgcaagaaattttgcgtggcgatatgggctttaacggttatgtcgtgtctgactgtggcgccattgccgatttttacgagagtagatcgcaccacgtggttgactcacctgcagaggctgcagcgtgggccgttaaatcgggtaccgatttaaactgtggcgattcacatggcaatacctacaccaacctgcattacgcgttacagcaaggtttaattacagaagattatattgatatagcggtaaagcgtttgtttaaagcgcgtattaagcttggcatgtttgacgagcaagaccgcgtgccttacagcgaaattggtatggatgttgtaggttcacctaagcacctagcgctaacccaagaagcggcagaaaaatctattgtgctgctaaaaaacaatggtgtattgccattaaaagcaggggtaaaggtagccgtaatagggccaaatgcagttgatgaagatgtattggtaggcaactaccacggcgtaccagtgaaacctgtgttgccgctagaggggattgttaatcgtgttggcgaggccaacgtattttatgccccaggcagtgcacaaatagccgatatatacagccactacgaaccgataagtgcagaaaatttttatcataaagatgcaaatggtaatttagctgcaggcttaaaagcagagtattacgccgattattacaacgcagctgaaattaacgacgatacctttagcgcaaccccagcgttaaatagaattgatgcagatattaatttctcttggcctgtatcgcctattgataattcgttagatgatgaatttagtgcagtatggacaggcatacttaaaccgaaaaagtcgggtagctaccgtttctcgggcacggttgcattagccattaacggcaaacctgttaatggggctgttaacctaaaggcaggtgaaagctataacataaaagctatttttggcgtgcaaaaatggtggcccgttaatgcaatacacccgtacggaaaacttacttggctagatgagtcgcgcgatttagaagaagaggcattagctgctgcccgaaaagccgatgtgattatttttatgggcggtatagatgcgcaccttgaaggcgaagaaatgccgctagagctagatggctttactcacggtgatcgtacgcacattaatttacctaaagtacaaaccaatttgcttaaacaattaaaagcaacgggtaaacctgttgtaatggttaactttagtggtagtgccatggctttaaattgggaaagcgaaaagctagacgcaatactgcaagcgttttacccaggtgaagcaaccggtacagcgttagctaatattttgtggggcgatgtaagcccgagtggccgcttacctgtaaccttttacaaaggcgtagacgatctaccagcatttaatgattaccacatggaaaaccgcacctataaattttaccgcggtgagcctttgtatgcatttggccacggtttaggttacgttgattttgcttataacaatttagtcgtagcaaatactgcagaagcgggcaaagcgctacctatagctgtaagcgtaaccaataccggtaaaatgcaagcagaagacgttgcccaagtttatataagtttgctagatgcccccgcaaacacgcccatccgcgatttaaaagcgtttaaacgtaccaagcttgcggcaggcgaaagcaccgagcttgaatttaacttgccggcgagagtgcttacctatatagacgataatggtaaaacccaaacctatactggcagggtagaagttactgttggctctgggcaaaagggatacgtaaaagaaaatgcgatagctgtagcgactattaacgttcagtag

SEQ ID NO: 71 - protein, 317 aa, Microbulbifer degradans
MYTYVSAIALFIFSIASSCCVAQNPLDFGSNIKTADPSGHIWADGRMYLYTSHDQECQEDFYMKDWHTFSSSDLINWTAHGPSLSVADITWADNYAWAPDAAYKNGKYYLFFPAGTGVKDRVNPEKSTKWMGIGVAVSDSPTGPFKDAIGAPLWTDPYANDPSIFIDDDGKGYLYFHGKGADYLVAEMADDLLSVKGEFHKMDMGGYEPKMEGPWVFKREGMYYFTMPENNRSLAYYMAKSPFGPWEYKGIFMQEEGGNNHHSIVQFKGKWILFYHRWLMGEGECKKKQRHTAAEYLHFNADGTIKEVKRTREGLTK

SEQ ID NO: 72 - DNA, 954 bp, Microbulbifer degradans
atgtacacatatgtatccgccatagcactatttatattttcaattgcctcgtcgtgttgtgttgcccaaaacccgctcgactttggcagtaatattaaaaccgcagatccgtctggccatatatgggctgatggcagaatgtacctttacacctcgcacgaccaagaatgccaagaagatttttatatgaaggattggcataccttttcgtccagcgacttaataaattggactgcccacggcccaagtttatctgtagcggatattacgtgggcagataactacgcatgggcgcccgacgcggcctataaaaatgggaagtactatttgttctttccggcgggaaccggtgttaaagatagagtaaaccccgaaaaaagcactaagtggatgggcattggtgttgcagtaagcgatagccctacaggcccctttaaagatgcgattggcgcccccttgtggaccgacccctatgccaacgacccaagtatttttatagatgatgacggcaagggctacttatattttcacggtaaaggtgcagactacctagtagccgaaatggcagacgatttactgagtgtaaaaggtgagtttcacaaaatggatatgggcggttacgagccaaaaatggagggcccttgggtttttaagcgcgagggaatgtattactttaccatgccagaaaacaatcgttcacttgcttactatatggcgaaatctccctttgggccgtgggaatacaagggcatttttatgcaagaagaaggcggtaacaaccaccattctattgtgcaatttaaaggcaagtggatattgttttatcaccgctggttaatgggcgaaggcgagtgtaaaaagaagcaacgccacaccgcagcggaataccttcactttaatgccgacggcacaattaaagaagtaaaaagaacgcgcgaggggttaactaagtag

SEQ ID NO: 73 - protein, 577 aa, Microbulbifer degradans
MKIKCLLLAVYAGLLAACALDAPLKTSSKPLAHFSWFEYQGNDEIFKAPLASNQYQNPILAGYHPDPSIVRVGEDYYLVNSTFGFYPGIPVFHSRDLVNWTQLGNAIHRPEQLSFDGIHLGYNGVYAPAIEYRDGTFYVINTCVACGGNFIVTATNPAGPWSDPIWLPEVIGIDPSLFFDEDGKTYIVHHRNPPVQKYPAHTALWVMEVDSKTFAPVSDDVMLVDGGDEAPWHTEYIEGPHIYKIDGTYYLYAPGGGTGYFHGQLVYRSDNVFGPYEANPNNPVLTQVGLPDDREHPVTATGHADLFQDTNGDWWTVFLGTRVYDLAKPPQDPGNFATGRETFMLPVTWQNGWPHVLEKGEAVPYRVTKPKLPAGKPAPRAMTGNFTVREEFTNASLAPHWLFVRTPRSKWWQTGNGELILEARADTIGAVNQPSFIGRRLAHMTASFATQLTFNPHTVGDEAGLLAVQNDEHFYAFGLGLNSKGQTVLRVRKKAGKNESIRGDTVAEQVVKLKHGHPIYLRVNIGKAELNFAYSTNGKRYTTLLNQADANLLTTAKAGGFTGAVVGMYAESTAQQN

SEQ ID NO: 74 - DNA, 1734 bp, Microbulbifer degradans
atgaaaattaagtgcttactccttgctgtttacgcgggtctacttgcggcttgcgcgctggacgcgccgctcaaaacctcaagtaaaccgctagcgcatttttcgtggtttgaatatcaaggtaacgacgagatatttaaggctccactcgcctcaaatcaataccaaaaccccatactcgccggctaccacccagacccaagtattgtgcgagtaggcgaagattattatttggtgaactccacctttggcttctaccctggcattccagtatttcacagccgtgacttagtgaattggacccaactgggtaacgctattcaccgcccagagcaactttcatttgatggtattcacttaggctacaacggcgtttatgcaccggcaatcgaataccgcgacgggaccttttacgtaataaatacctgcgtagcctgcggaggaaattttatcgttaccgccaccaatcccgcgggcccctggtcagacccaatatggctaccagaggtaattggcatagacccctcgctatttttcgacgaggacggcaaaacctatatcgtgcatcatcgtaatccacctgtgcagaaataccctgcccacacagccctgtgggtaatggaagttgactccaaaacatttgcgccggtatctgacgatgtaatgcttgtggacggtggcgacgaagcgccatggcacacagaatatattgaagggccgcatatatataaaattgatggcacctactacctctatgcccctggtggcggcacgggatacttccacggccaattggtgtatagatctgacaatgtatttggaccctacgaagccaaccccaataaccctgtgttgactcaagttggtttacccgacgacagagaacaccctgtaacggcaacgggtcatgcagatttatttcaagataccaacggcgactggtggacggtatttctgggtactcgcgtttacgatttagctaagccaccacaagaccccggcaattttgccaccggacgcgaaacatttatgttgccagtaacatggcaaaacggctggccacacgtgctcgaaaaaggcgaggctgtgccctaccgagtaaccaaacccaaattacctgcaggcaaacccgccccgcgcgcaatgactggaaactttactgtgcgcgaggaatttaccaacgcttcgcttgccccccactggctatttgttcgcacaccgcgttccaaatggtggcaaacaggtaatggcgaacttattttagaagcgcgcgccgataccattggggcagttaaccagccgtcgtttattggccgacggctcgctcatatgacggcctccttcgccacccaactaacctttaacccacacaccgttggcgacgaagcagggttactcgccgtacaaaacgacgaacacttttacgcctttggcctagggttaaacagtaaagggcaaaccgttttgcgcgtgcgtaaaaaagcgggtaaaaatgaatcgataaggggagatacggttgccgagcaggttgttaagcttaagcacggccaccctatttacctgcgtgtaaatataggtaaagccgaattaaatttcgcgtatagcaccaacggcaaacgctacaccaccttgttgaaccaagccgatgccaacctacttaccacagctaaagcgggcgggtttactggcgcagtagtgggtatgtacgccgaatccaccgcacaacaaaactaa

SEQ ID NO: 75 - protein, 566 aa, Microbulbifer degradans
MRLLPILLVSLLPLLSSCTSAINGQQNSQTSPVFDWFEYAGSDALYNTVAPSKNAYTNPVIKGFYPDPSIVRVGADYYLVNSSFGYFPGVPIFHSTDLVNWVQIGNILERPSQLQIPSGMGVSRGIFAPTLRHHNGIFYMITTMVDGGGNFIVTAKNPAGPWSDPVWLPEVGGIDPDLFFDDNGKAYILNNDAPIGEPLYDGHRAIWIREFDLATLKTVGDAKLIVNGGVDITTKPVWIEGPHLFKNKGAYYLINAEGGTSVNHSQVVFKAQSPWGPYIPWENNPILTQRHLPADRANPVTSVGHVDLVQTQHGDWWAVFLGCRPYKDNYYNTGRETFLLPVDWSGEYPVILRGDAEVPYHHQRPQLGASQQPAIALSGNFIERDEFDSALKLYWRKVRTPTNNFTDLTSQKGKLVLTANNTDLSDFGSPAFIARAQQHLTGSATTKLVYTPPHVGDKAGIAAFQNDEYFYALTVTKNNSGLAIQLEKQLGKNKEIVAQYPLQEKTLRNGLYLKIEFNNDKYDFSYSTNNTKWQSVGETQDGTILSTQSAGGFVGATLGIFAYTAH

SEQ ID NO: 76 - DNA, 1701 bp, Microbulbifer degradans
atgcgacttttacctatcttactcgttagcttacttccactgctctcaagctgcacaagcgccataaacgggcaacaaaatagccaaacctcgcctgtatttgattggtttgaatacgcgggaagcgatgctttatacaacacggttgcgccaagtaaaaatgcctataccaacccagtaataaaagggttttatccagatccaagcattgtaagagtgggagcagattactacctcgtgaactcttcatttggctacttccctggcgtgccgatatttcatagcacagatttagtgaattgggttcaaataggtaatattctcgagcgcccatcacaattacaaatacccagcggcatgggtgtgtcgcgaggtatattcgccccaacactgcgccaccacaacggtattttttacatgattactacaatggtagacggtggcggcaattttattgttactgcaaaaaaccccgcaggcccttggtcggacccagtatggttacctgaagtgggcggtatagacccagatttattttttgatgacaacggcaaagcctacatacttaacaacgacgcccccattggcgagccgctttacgatggccaccgagccatttggattcgcgaattcgacttagccacattaaaaaccgttggcgacgccaagttaatagtaaacggcggtgtagatataactaccaaacccgtttggatagaaggcccacaccttttcaaaaataaaggcgcttactatttaattaatgcagaaggtggcaccagcgtgaatcacagccaagttgtatttaaagcgcaaagcccttgggggccgtatattccttgggaaaacaatccaattttaacacagcgccatttaccggctgatcgcgccaaccccgtcacatccgttggccatgtcgatttagtacaaactcaacatggcgactggtgggcggtatttttaggctgcaggccctataaagataactactacaataccggccgcgaaacatttttattaccggtagattggtctggcgaataccccgtcattcttcgcggcgatgccgaggtgccctatcatcaccaacgcccccaattgggagcatcccaacaaccagccattgcccttagcggtaactttattgagcgcgatgaatttgactcagcacttaaactttattggcgcaaggttcgcacccccacaaacaactttacagatttaacctctcaaaaaggcaagcttgttttaactgcaaacaatacagatttaagcgactttggatcaccagcatttattgcgcgcgcacagcagcacctaacaggcagcgcaacaaccaaactggtttacacacccccacacgtgggcgacaaagcgggtattgctgcctttcaaaacgatgagtatttttatgcgcttaccgttacaaaaaataatagcggccttgccatacaactagaaaaacaacttggcaagaacaaagaaattgttgcgcaatatccactacaagaaaaaacgcttcgcaatggcttatatttgaaaatagaatttaataacgacaaatatgatttcagctattccacaaataacaccaagtggcaatcggtaggcgaaacacaagatggaactatattaagcacgcaaagtgcaggcgggtttgtaggtgccacgctaggtatatttgcatataccgcgcactaa

SEQ ID NO: 77 - protein, 319 aa, Microbulbifer degradans
MSMFNKKTLAAGIVAACLTNVSASYAANPAITDTHTADPAALVHGDTVYLYVGNDEAKDNRVFYDLKKWLVYSSKDMVNWTNHGSPLAATDFKWASGDAWAAHTVEKDGKFYWYTTVRHATINGFAIGVAVSDSPTGPFKDALGKALISNDMTTDTDIDWDDIDPAVFIDDDGQAYIFWGNTKPRWAKLKPNMIELDGPIHAIDIPHFTEALYVHKHGEYYYLSYATGFPEKTAYAMSKSIEGPWEYKGILNELAGNSNTNHQSVIDFKGKSYFIYHNGGLGQDGGSFRRSVCIDYLNYNADGTIKRIVMTSEGVDPVK

SEQ ID NO: 78 - DNA, 960 bp, Microbulbifer degradans
gtgagtatgtttaataaaaaaacactagcagccggtattgtagctgcatgtttaactaacgtaagtgcaagctatgctgccaaccccgcaattaccgatactcacacggccgatcccgctgcgttagtgcacggcgataccgtttatttgtacgtgggtaacgatgaagcgaaggataaccgcgtattttacgatcttaaaaaatggttggtgtattcatcaaaagatatggtgaactggaccaatcacggttcgccgttagctgcaacggattttaagtgggccagcggcgatgcgtgggcggcgcacacggtagaaaaagatggcaagttttattggtataccacggtgcgtcacgcaaccattaatggttttgccattggcgttgcagtaagtgatagccctacagggccattcaaagatgctttgggtaaagcactaataagtaatgacatgaccaccgataccgatattgattgggacgatatagacccagcagtatttattgacgacgatggccaagcgtatattttttggggcaacaccaaaccgcgctgggccaagttaaaacccaatatgattgaactagatggacctattcacgcaatcgatattccacactttaccgaagcgctatacgtgcacaaacacggtgaatattactacttaagctatgcgacaggctttccagaaaaaacagcttacgctatgagcaaatctatagaagggccgtgggaatacaaaggcattcttaatgaattggctggtaactcaaatactaatcaccaatctgtcatcgattttaagggcaagtcatactttatttatcacaatggtggcttgggtcaagatggcggtagcttccgtcgcagtgtatgtatcgattatttgaactacaacgcggatggtactatcaagcgaattgtaatgacatcagaaggtgtagacccagttaaataa

SEQ ID NO: 79 - protein, 385 aa, Microbulbifer degradans
MPEHTRKRLLSTLGLALSGTAITLTLVGCGKDNPATQTEGSHSAGHTEVAAEQTHDIGGPGPEGKPINDPLVTHIYTADPSAHVFDGKLYIYPSHDVEAGIPQNDNGDHFDMRDYHVLSMEEPGGKVTDHGVALAREDVAWAGRQLWAPDAAEKDGTYYLYFPMKDKDDIFRIGVASGSTPYGPFKAEPEPMPGSYSIDPSVFQDGDDYYMYIGGIWGGQLQRWTTGEYNPEDVYPADDEPALLPKMAKLSADMKSFAEPLRDIQILDENGELIKAGDNDRRFFEAAWVHKYNGKYYLSYSTGDTHYIVYAIGDNPYGPFTYQGVVLNPVIGWTNHHSIAEFKGKWYLFYHDSSLSGGVTHLRSVKMTELTHNPDGTIQTINAYK

SEQ ID NO: 80 - DNA, 1158 bp, Microbulbifer degradans
atgccagaacatacgcgtaagcgcttactatcaaccttaggcctagctttatcgggcacagctataaccctaacgcttgtggggtgcggtaaagacaaccccgcaactcaaacagaaggcagccacagcgctggccatacagaagttgccgcagaacaaacacacgacataggcggcccaggccctgagggcaagccaattaacgacccgcttgttacccacatatacaccgcagacccttctgcccatgtgtttgacggcaaactttatatttacccatcgcacgatgtggaagcgggtattccgcaaaacgataacggcgatcacttcgatatgcgcgattatcacgtgctttccatggaagagcctggtggcaaagtcaccgatcacggcgtagcccttgcgcgcgaagatgtagcttgggctggtcgccaactgtgggcgcccgatgcggctgaaaaagacggcacttactacctgtatttccccatgaaagataaggatgacatcttccgcattggtgtcgccagtggcagtaccccttatggcccatttaaagccgagccagagccaatgcccggcagctatagcatagacccaagcgtatttcaggatggcgacgactactacatgtacataggtggtatttggggcggccagttgcagcgttggacaaccggtgagtacaacccagaagatgtatacccagcggatgacgagcctgcgctattacctaaaatggccaagctaagtgcagatatgaaaagctttgccgagccattaagagacattcaaattttggatgaaaatggcgagctaattaaagctggcgataacgaccgacgtttcttcgaagccgcgtgggtacacaaatataacggcaagtattacttgagctattcaaccggtgacacccactatattgtgtatgccattggcgataacccatacggcccgtttacttaccagggtgtagtgctcaaccccgttattggttggactaaccatcactcaattgctgaatttaaaggtaagtggtatttgttctaccacgatagttcgctttccggtggtgtaacacatttgcgcagcgtgaaaatgacagagctaactcacaacccagatggcactatccaaaccattaatgcctataagtaa

SEQ ID NO: 81 - protein, 738 aa, Microbulbifer degradans
MATLGVNAAKFAMFAAICLQFSVAEAAKSRDGYGLWLDYQPITNTREREGYIKALSPWQVEGEAATADFIRQELTAALGAMLGVEAGPVGDYTHNSLAHPVARLLVATPEESAVIRSLALGDALTRVGQEGYLIKTTRYRDKPITIVTANTHAGLLYGTFKLLQLLQTGQAVSNLAIESAPATKLRVLNHWDNLDRYVERGYAGESIWNWHKLPHYKSQRYYDYARANASIGINGVVLNNVNADPLILTPQYLVKVKALADIFRPYGIKVYLSVKFSSPNLIGGLPTSDPLDKNVQAWWQAKANEIYSLIPDFGGFLVKANSEGQPGPGDFGRSHAQGANMLADALAPHGGNVMWRAFVYNVEANVERSKQAYNEFKPLDGTFRQNVLVQVKNGPIDFQPREPFSPLFGAMPKTPLMMEFQITQEYLGFSTHLVYLGPLYEEVLKADTYAKGAGSTVAKVVDGSLYGHGITGMAGVANIGSDRNWTGHIFGQANWYVFGQLAWNPEVSTKQIADDWIRMTLTRDDKAVNTIRAMMMASRETAVNYMTPLGLHHIMGWGHHYGPAPWIGEQKPDWMREDWTSVYYHSANATGLGKDRTASGSNVIAQYHAPLRQAYSDPKTTPTELLLWFHHLPWHYELANGNSLWHELVARYYLGAQAVAEMAKTWDGLEANIPPQLFKQVQMALAIQTQEAAWWRDACVLYFQSYSKQSLPEGFAKPKHSLEYYKGLSFPHAPGDGR

SEQ ID NO: 82 - DNA, 2217 bp, Microbulbifer degradans
atggctactttgggggtaaatgccgctaagtttgccatgtttgcagctatttgcttgcagtttagtgtcgccgaagcggctaaaagccgcgatggatatgggctgtggttagattaccagccaattaccaatacccgcgaacgcgagggctatataaaagcattaagcccatggcaggtagaaggcgaagctgcaactgccgattttattcggcaagagcttactgcagcgttgggcgctatgcttggcgttgaggctggtccagtgggtgattacacccataactccctcgctcaccctgtggcgcggctattggttgcaactccagaagaaagcgctgttattcgctctttggctttaggcgatgctttaactcgagtagggcaagaggggtaccttattaaaaccacgcgttaccgtgacaagcctatcaccattgttaccgcgaacacgcatgcaggcctgctgtatggcacattcaaactactgcagctgctgcaaacagggcaggccgtttctaatttagctattgagtccgccccagcaaccaaactgcgtgtgcttaaccactgggataacctcgatcgctatgtggagcgcggctatgccggtgagtctatttggaactggcacaagctgccgcactacaaatcgcagcgctactacgattacgctcgcgctaacgcgtccattggtattaacggtgtggtactaaacaatgttaacgccgaccccttaattcttaccccgcagtaccttgtaaaagtaaaagcactggcagatatttttaggccctacggcattaaagtttatctttcggtgaagtttagctcgccgaatcttattggcgggctgccaacatccgacccgttagataaaaatgtgcaagcttggtggcaagcgaaagcgaatgaaatttactcgctcattcccgactttggtggctttttagtaaaagcgaattcggaagggcagcccggcccaggggactttggccgcagccatgcacaaggggcaaatatgttggccgatgcactggcaccccatggcggcaatgtaatgtggcgcgcgtttgtatataacgtagaagccaatgtggagcgatccaagcaggcatacaacgaatttaagccattagacggtacctttaggcaaaacgtattggtgcaagtaaaaaatgggccaattgattttcagccacgtgaaccgtttagcccgctgtttggtgctatgcccaaaacgccgttaatgatggagtttcaaattactcaggagtacttggggtttagtactcaccttgtttacttggggccgctgtacgaagaagtacttaaggccgatacctatgcgaagggggcagggtctactgttgcgaaggtggtcgatggctcgctctacgggcacggtataacgggtatggctggggtagctaatattggcagcgatcgcaattggaccggccatattttcggccaagccaactggtatgtatttggccaattggcgtggaaccccgaggtaagcactaagcaaatagccgatgattggattcgcatgacactcacccgcgacgataaagcggtaaacaccattcgcgcaatgatgatggccagccgcgaaacggcggttaactacatgacgcccctggggctgcatcacattatggggtgggggcaccactacggcccagcgccgtggataggcgagcaaaaacccgattggatgcgtgaagattggacatctgtttactatcatagcgcaaacgccacagggctaggcaaagatagaacagcttctggcagcaatgtcatagcgcaataccacgcccctttacggcaggcctatagcgacccgaaaaccacgcccaccgagttgctattgtggtttcatcatttgccttggcattatgaattagcgaatggcaatagcctgtggcatgaactggtagcgcgttactatttaggcgcgcaggctgtggcagaaatggccaaaacgtgggatggcctagaagctaatatccccccgcagctattcaaacaagtacaaatggcgctggctattcaaacccaagaagccgcgtggtggcgcgatgcctgcgtgctgtattttcaaagctattctaagcagtcgctacccgagggctttgcaaaacctaagcactcgctcgaatactataaagggttaagcttcccgcatgcgccgggtgacgggcgttaa

SEQ ID NO: 83 - protein, 1316 aa, Microbulbifer degradans
MRNKLGSMLKMSAAIGGLVAAGSAVAGPVGFASLNGGTTGGAGGQVVYASTGAEINQAMCNRASDDTPLIIYVTGTINHGNTAKYSGSCDTTADEIQFKGVKNISLIGTGSGAVFDQIGIHLRDTSNIILQNLHIKNVKKSGSPTSNGGDAIGMESGVYNVWVDHCELEASGGESDGYDSLLDMKATTQYVTVSYTYYHDSGRGGLMGSSDSDDTNTFVTFHHNYYENMDSRLPLLRHGTAHAFNNYYNGIAKSGMNPRIGGQIKAENNYFENAHNPIGTFYTDDMGYWDLRGNIFGSNVTWASADDETPAGPNPTSTTSIHISYPYDLDDAACVPDIVKSTAGVGTGLAVSDGSCTITTPPSTSSSSSSSSSTSSTGSSSSSSSSSSSSSSSNGGSLVLGNNLSIGAGSDGSSKGAGSYGNVRDGDVSSYWAPSGSTGRVSIKWSGSQTVNAIVIKEAAGYEGNISGWQVTDNDTGAVLAAGSSVGTITFDAVTTSKINFEITSSNGTPTVAEFETYNATGSSSSSSSSSSSSSSSSSSSSSSSSSSSSSTGGTATLSTTVSGDQVTLNWSVNNATVTGQQIYRDVDSDPAGRVRIASGVTGNTYTDTGLANGTYYYWVKVTDSNSATINSNYSEAQVNVYTTSTTTFEEDAGYCSVDGSVDSNNSGFAGSGFANTDNASGNGVNYAVSVPVAGVYTLQVRFANGSSARPADVLVNYGNAGVFDLPSTGSWTSWSNSNEISVNLVAGNNIIRLEATTSGGLANIDSLSVTGVEPSAGDCNGSVGSSSSSSSSSSTSSTSSSSTSSGGSSTSSSSTSSSSTSSTSSSSTSSSSTSSTSSSSGGGTASCEQLINDPSVNWDESALASEQEIVACLAQSLGSPVGFGEGTTGGYDPSGGSNLVVIKKNIGISVEQQILDAISTENHNWIVFDKDDFAARTAVAMYRLDCDNADVRSALGGASAAQCRDHIAWCSANGISDEHDCENEFFNNRLNDSDLPIRNQMIQSNTTIDGRGANAYFFFNGFSIGKDSSGASLYAAQNVIVTNNEFIGAGHTEDHDLDPDMIRSTGESNKIWIHQNTFDHTGDSAFDVKVGAYDITISFNKLVNVKRAALHGSSDSRAINSQITTTMHNNLFYTSDDQYALSTYDTLRRVPLMRRGQSHMFNNVFYGYRKDILSVRVGGRIAFEDNIILNKESSSTPGDGLKKGDDMEYYVETLLRDFREGGLEISGSYVSFADSACNSYGASGDLTASHGATPDMFDDYSSASKNTISANRFVAGDDLTDYVFATAGKGGKAPYVSTFTAGQNSLISQANPVCQ

SEQ ID NO: 84 - protein, 93 aa, Microbulbifer degradans
MPPVELLDELLDEELDELLDEELEELELLEELEPVALYVSNSATVGVPLEEVISKLILLVVTASNVIVPTLEPAANTAPVSLSVTCQPLILPS

SEQ ID NO: 85 - DNA, 3951 bp, Microbulbifer degradans
atgagaaataaattaggctcaatgttaaaaatgagcgcagccattggcggtttagttgcagcgggttccgctgttgcaggcccagttggtttcgcaagtttaaacggcggcactaccggcggcgcgggcgggcaagttgtatatgctagcaccggtgctgaaattaaccaggctatgtgtaatcgcgcaagcgacgatacaccgctaattatttatgtgacgggtaccattaaccacggtaacaccgccaagtattctggtagctgcgataccactgcagatgaaattcagtttaaaggtgtaaaaaatatatcgttgataggaacgggcagcggtgctgtgttcgatcaaatcggtattcacctacgcgatacctcgaatattattttgcaaaatttgcatattaaaaacgttaagaagtctggttcgcctacttcgaatggcggtgacgctattggtatggaatctggcgtatacaatgtgtgggtagaccactgtgagctagaagcttcaggcggtgaaagtgatggatatgattcattgctagatatgaaagccaccacgcagtatgtaacggtttcttacacttactatcacgattctggtcgcggtggtttaatggggtctagtgatagcgacgataccaataccttcgtcaccttccaccacaactactacgaaaatatggattcgcgcttgccgttactgcgtcacggtacagctcatgcatttaacaactactataatggtattgctaaatctggcatgaacccacgtataggtgggcaaataaaagcggaaaacaattacttcgaaaatgcgcacaacccaattggtactttttatacagacgatatgggttactgggacttacgcggcaatatatttggcagtaacgtaacgtgggcgtctgcggatgatgaaacccctgcaggcccgaacccaacatccactacgtctattcatatttcttacccctatgatctagatgacgctgcttgtgtgcctgatattgtaaaatccacagcaggtgtgggtactggcctagcggtttcagacggaagctgcaccataacaacgccaccttcaacgagttcgtctagctccagttctagctcaacctcgtcgactggttcgagttcgtcttcaagctcttcctcttcaagcagctctagctccaatggcggcagcttagtattaggtaacaacctttcaattggtgctggctctgatggtagtagcaagggagcaggttcgtacggcaatgtgcgcgatggcgatgtaagtagctattgggcgccgagtggcagtactggtcgtgtttcaattaaatggagcggcagccaaactgttaacgctattgttattaaagaagcggcaggctatgaaggtaatattagtggttggcaagtaactgataacgataccggtgcagtattggctgctggctcaagcgtaggcacaattacgtttgatgcggtaacgactagcaagatcaatttcgaaattacttcttctaacggtacaccaacggtagcggaattcgaaacatataatgctacaggttctagctcttcaagcagctcgagttcttctagctcttcatcaagtagctcgtctagttcttcatcgagcagttcgtctagtagttctacaggcggcaccgctactttaagtacaacggtttctggcgatcaagtaacgttgaattggagcgtaaataatgcaaccgtaactggtcagcaaatttatcgcgatgtggattcagacccagctggccgtgtgcgcattgcatccggtgtaactggaaatacttacacagataccggtttggctaacggaacttattactactgggtaaaagtaaccgattcaaactcagctacaattaattccaactactcagaagcgcaagtgaatgtttatacaacatctactacaacgtttgaagaggatgcgggttattgctcggtagacggttcagtagatagcaataacagtggctttgctggcagtggttttgctaataccgataatgcttcgggtaatggcgtaaactacgcggtaagcgtacccgttgctggtgtgtacacgctgcaagtgcgttttgctaatggctcaagtgcacgtcctgctgatgtgttagtgaactatggtaacgccggtgtatttgatctgcctagcacaggttcttggaccagctggagcaactcaaacgaaattagcgttaacttagttgctggcaataatattattcgtttagaggctaccacgtctggcggcttggcgaatattgatagcctatctgtaacgggtgtagagccttctgcaggtgactgtaacggtagtgttggttctagcagttctagttcttccagctcttctacttctagcaccagttcatctagcactagctctggtggcagctctactagctcaagctcaacgtctagctcatctacaagctctacatctagtagttcaaccagctctagcagcacgtcttctacctcaagctcttcgggcggtggtacggcaagttgtgagcagttgattaacgatccaagtgttaactgggatgagtctgcactggcttcagagcaagaaattgtagcctgtttggctcagtctctaggtagccctgttggctttggggaaggtactaccggtggttacgatccaagtggcggcagcaaccttgttgttattaaaaagaacataggtatttctgttgagcaacaaattttggatgctataagcaccgaaaaccacaactggattgtgttcgacaaagatgattttgctgcgcgcactgcggtagcgatgtatcgcttagattgtgacaatgccgatgtgcgttcagcattgggtggcgcaagtgctgcacaatgtcgcgatcatatagcttggtgttctgctaatggtatttctgacgagcatgactgtgaaaatgaattctttaacaaccgtttaaatgattcagatttgccaatccgcaatcaaatgattcagtcaaacactaccattgatggtcgtggtgcaaacgcatacttcttctttaatggtttctccattggtaaagatagcagtggtgcaagcttgtacgcagcgcaaaatgtgattgtaacgaataacgagtttattggtgccggtcacactgaagatcacgatctagacccagatatgattcgatctactggcgaatcgaacaaaatttggattcaccaaaacacgttcgaccatactggtgattctgcgtttgacgtaaaggtgggtgcttacgatataacaatatcattcaataagttggtgaacgtgaagcgtgctgcgctacatggttcaagtgatagccgagcaattaactcgcaaatcacaaccactatgcacaacaacctgttctatacttcagatgatcaatacgcgctaagtacctacgacactttgcgtcgtgtaccgctaatgcgtcgcggtcaatcacacatgtttaacaacgttttctacggttaccgtaaagatattctaagcgtgcgtgttggcggtcgtatcgcctttgaagataacattattttgaataaagaaagcagctctaccccaggtgatggcctgaagaaaggcgacgacatggaatactatgttgaaaccttgttgcgcgacttccgtgagggtgggttagaaattagcggtagctatgtatcgtttgcagatagcgcttgtaattcctatggcgcatcgggtgacttaaccgcatcgcatggtgctacgccagatatgtttgatgattacagctctgcatctaaaaatactatatcagccaatcgctttgttgctggcgatgacttaactgactatgtatttgctactgcaggtaagggcggtaaagcgccttatgtttccacctttactgctgggcaaaatagccttatttcacaggctaacccagtttgtcagtag

SEQ ID NO: 86 - protein, 427 aa, Microbulbifer degradans
MNKNNVIAYLLISTFLLFSATVFAVKPSNAETRYSAMGADTPAGLGGTLPDGQSRIVRVTNLNASGEGSLAWALGLARPRVVVFEVGGVIDLAGQSITVTQPFLTVAGQSAPAPGITLIRGGLNIRTHDVRVQHIRVRPGDNLQPKRSGWESDGISVAGENAKDVHIDHVSVSWAVDENLSASGNRYKGYGQTAERVTFSNNLIAEALDYASHKKGKHSKGLLVHDYVRDVAVVRNLFVSNDRRNPYFKAHTIGFVANNIIYNAGNAAIQVNYIEREWEGQSTGPANARVAVVNNQLVYGRDTYSDLALVSVRGDAYLTGNSVTNLMGEPMPITEGAVNSLASAPSWLTGYELWDADEMRELLVASVGATPWARDAIDTRIINGVATGKARIIDSQQDVGGYPSYKQTNKKFDIPDDKIAEWLLGYL

SEQ ID NO: 87 - DNA, 1284 bp, Microbulbifer degradans
atgaataaaaataatgtaattgcttatctgctaatttcaacttttctattattttctgcgactgtgttcgcggttaaacccagcaacgctgaaacccgatattccgcaatgggtgcagataccccagcaggtttgggaggcactttgccagatggtcagtctcgtatcgttagggtgactaatttaaatgcaagtggggagggctcgctcgcatgggcgctgggtttagctcgaccacgcgtagtggtgttcgaagttggcggtgttatagatcttgctgggcaaagtattaccgtcacgcagccattccttactgttgccggtcagtcggcgccagcaccgggtattacattaattcgcggcggtttaaatatacgaacccacgatgtaagagtgcagcatattcgcgtgcggccgggagataacttacaaccaaagcgctccggctgggaaagtgacggtatatctgtggccggtgaaaatgccaaagatgtacatatagatcatgtatcggtaagttgggcggtagatgaaaacctctccgcttcggggaatcgttacaaaggttacggtcaaaccgctgagcgggtaacgtttagtaataatctcattgccgaagcgttagattatgccagccataaaaaaggcaaacactctaagggattattggtacacgattatgtgcgagatgttgccgtagttagaaatttgtttgtgtctaatgatcgtcgcaacccgtactttaaagcgcacaccataggttttgtagcaaataatattatttacaatgcgggtaatgccgctatacaggttaactatattgagcgtgagtgggagggccagagtacaggcccagctaatgctagagtagcggtggtaaataaccagttagtttacggccgcgatacatactcagacttggcgctagtgtctgtgcgtggggatgcttatttgacgggtaatagcgttacaaatttaatgggcgagcccatgcctattacggaaggggcggttaattctttagcctctgcaccttcatggttaacaggttatgagttgtgggatgctgacgagatgcgtgagctgctagtagccagtgttggtgcaacaccctgggccagggatgcgatagatacccgaataattaatggggtggcaacggggaaggcgcgaataatagatagccagcaagatgtgggtggctacccgagctataagcaaacaaataaaaaatttgatataccagacgacaaaattgccgaatggttactgggttacctgtaa

SEQ ID NO: 88 - protein, 769 aa, Microbulbifer degradans
MRNTKHLLNSGAVLLASSIATAAMAGPVGFASLNGGTTGGQGGQVVYANTGTQINEAMCNRPSHDTPLIIYVSGTINHGNTEKVSGNCDTTGDEIQFKKVKNLSLIGTGNGAVFDQIGIHLRETSNIILQNLHIKNVKKSGSPTSNGGDAIGMESGVYNVWVDHCELEASGGEKDGYDSLLDMKATTQYVTVSYTYYHDSGRGGLMGSSDSDDTNTYVTFHHNYYKNMDSRLPLLRHGTAHAFNNYYDGITKSGMNPRIGGQIKAENNYFENAHNPIGTFYTNDMGYWDLSGNIFGNNVTWASADDETPAGPNPQSTTSIHISYPYSLDDATCVPKIVKATAGVGNGLAVSTGGSNCGTSSSSSSSSSSSSTSSTSSTSSSSSSSNSSSGGSGVNLSIGAGSDGSSKGAGSYGDVRDGNMSTYWAPSGSTGRVSIKWSSATTVSSIVIKEAAGFEGNITGWQVVNNENGAVLKSGSNAGVISFSPVSTTKLNFEITSSNGMPTVAEFETYSGTVGGTSSSSSSSSSSSSSSSSSSSTSSSGGSANLGTSVSGDQVSLNWSTSNIDVGSQQVYRDTDSNPSGRVRISAGVSGNSYTDYGLASGTYYYWIKITDQNGVVYNTNAAEAVVGSQAPTTFTAQESAGFCSVNGSVDSNNAGYTGDGFVNTDNASGNAAVYAFNAPSAGMYSLQVRYANGSSARPGDVLVNAGNIGTFDFSSTGSWTSWANSNELSAYFSAGNNTVRIQATNSGGLPNLDSVSVTGNAPAAGNCN

SEQ ID NO: 89 - DNA, 2310 bp, Microbulbifer degradans
atgagaaacactaaacacctactcaatagcggtgccgtattgctagctagcagtattgcaacagctgcgatggcggggcctgtgggctttgcatcgcttaatggtggcacaacgggcggtcaaggcggtcaagttgtatacgccaacaccggtacacaaattaacgaagccatgtgtaaccgcccatctcacgatacgccgttaattatttatgtatccggtaccattaaccacggcaacaccgaaaaggtgtcgggtaattgcgatacaaccggcgacgagattcagtttaaaaaagttaaaaacctatcgttaattggtactggtaacggtgcggtgtttgatcaaataggtattcatttacgcgaaacctccaatattattctgcaaaaccttcatattaaaaatgttaaaaaatcgggttctccaacctccaatggcggcgatgcaattggaatggagtctggcgtatacaatgtgtgggtggatcactgtgagctagaagcatccggtggtgaaaaagatggttacgattcattgctagatatgaaagcaaccacgcagtatgtaaccgtttcttacacctattaccacgattcaggccgcggtggtttaatggggtcgagcgatagtgacgataccaacacctacgtgactttccaccacaattactacaaaaatatggattcacgcttaccgcttttacgccacggtactgcgcatgcctttaacaactattacgatggcattaccaaatctggtatgaacccccgtataggcggtcaaataaaagcagaaaataactatttcgaaaacgcacacaacccaataggtacgttttacacaaacgatatgggttactgggacttaagcggcaatatatttggcaacaacgtaacgtgggcgtctgcggatgatgaaacccctgcagggccgaatccacaatccacaacgtccattcatatttcttacccctacagcttggatgacgcaacgtgcgtgccgaagattgtaaaagctactgcgggtgtgggtaacggtttggctgtgtctaccggtggtagcaattgcggtacttctagctcttcgtctagcagctcttcgtccagctctacctcgtctaccagttctacatctagcagttcttcatcatccaatagttcttctggtggctcaggtgtaaacctttcaattggcgcaggttctgatggtagcagtaaaggtgcgggctcttatggcgatgtgcgcgatggcaatatgagcacctactgggcaccgagtggcagcactggtcgcgtatctattaagtggagttcggcaacgacggtaagtagcattgttattaaagaagcggctggctttgaaggtaacattactggctggcaagttgtaaacaacgagaatggcgcagtattaaaaagcggctctaacgctggcgtaatttctttttctccggtttctactacgaagttaaatttcgaaattacctcttcgaacggcatgcccacggttgcagaatttgaaacctatagcggcacggttggtggtacttcgtcatccagttcttcaagtagttcgtcaagcagttcttcaagcagctcaagttcaacgagcagctctggtggttccgcgaatctaggtacctcggtaagtggcgatcaggtttcacttaattggtctacctcaaacattgatgtgggttcgcagcaagtttatcgcgataccgattcaaacccatctggtcgtgtgcgtatctctgcaggcgtttctggtaattcgtataccgattacggcttagctagcggtacttattactactggataaaaattaccgatcaaaacggtgttgtttacaacacaaatgccgcagaagcggttgtaggcagccaagcgccaacgacgtttactgcgcaagagtctgcgggtttctgctctgttaacggttctgttgattccaataacgctggctacactggcgatggttttgtaaataccgataacgccagtggcaatgcagcagtttatgccttcaatgcacctagtgcgggtatgtatagcttgcaggttcgctacgcaaacggttctagtgcacgcccaggtgatgtgctggtcaacgctggcaatattggaacatttgatttttccagtaccggttcttggacatcttgggcaaacagtaatgagttaagtgcgtacttctctgcgggtaacaatactgttcgtattcaagctactaactctggcggcttacctaacttagatagtgtttctgtaacgggtaatgcaccagcggcaggcaactgtaattaa

SEQ ID NO: 90 - protein, 594 aa, Microbulbifer degradans
MKIFKLLLMFVLAHNLVACGGSNDGGEIELNFGEENTPEPETEPEAEPEGEPEGEPEGEPEGEPEGEPEGETADATADAGFAGHNFNLTGGEGGTAYTVNNGKDLQTVLDNAKSSNSPVIIYVDGTINSFNSANGNQPIQIKDMDNVSIIGYGAEATFDGVGIAIRRANNIIIRNLTFKSVLTEGKDAISIEGDDDGSTTSNIWVDHNEFYSAPTADKDFYDGLIDSKSGASNITISYNYLHDHWKASLHGHTENDEGAHNTDRKITFHHNRFENIESRLPLFRRGVGHLYNNYYKDVGSTAINSRIGAELLIENNVFEDSQNPIVSFYSDVIGYWNTSGNLFTNVTWTTPGTGEVSAGATQTPTSDYVVPYSYTLMPAADVKAHVIASAGVGKIDQTGLTIPDPVTPEGDLGEPEAPVQGDVSLPYTENFAATDAANFFSAAYRDITGSAGTSTPMYHRVTGTVEINAQQLDMTGARVSIGNTTPSVSTTGADTTTTGVLDLSAPYTVSFKVVSVGGTLTKKFQIYVDNNTSASGDSIHGGSSRFYSETLDSLVAGQTYTVTGFTATNSSFITLRTESSGQIVLDDLSIQAAE

SEQ ID NO: 91 - DNA, 1785 bp, Microbulbifer degradans
atgaaaatttttaaattgttattaatgtttgtactcgcccacaacttagttgcttgtggtggcagtaacgacggtggtgaaattgaattaaactttggcgaagaaaacacaccagagccagaaaccgaaccagaagctgagcctgaaggagaaccagagggcgagccggagggagaacctgaaggagagcctgaaggggaaccagagggcgaaacagccgacgcaaccgcagatgctggcttcgccggccacaattttaatcttaccggtggcgaaggcggcacagcctataccgttaataacggcaaagatttgcaaacagttttagacaacgccaaatcgagtaattcaccggtcattatttacgtagacggcaccataaattcgtttaactctgccaacggcaaccagcctattcaaattaaagatatggataacgtatctataattggttacggcgccgaagcaacatttgacggtgttggtatagcaatacgccgcgccaacaacattattattcgcaaccttacttttaaaagcgtccttaccgaaggtaaagatgcaattagtatagaaggtgatgacgacggcagcaccacgtcaaacatttgggttgatcacaacgaattctacagcgccccaacggcagacaaagatttttacgacggtttaatcgatagtaaaagcggcgcgagcaacattactatttcttacaactacctgcacgaccattggaaagcatcgttacacggccataccgaaaatgacgaaggtgcacacaacaccgaccgcaaaattactttccaccacaaccgttttgagaatattgaatcgcgtttaccgctgttccgtcgcggtgtaggccatttgtacaataactactacaaagacgtaggctcaacggctatcaactcacgtattggtgccgagttattaattgagaataacgtttttgaagattcacaaaacccgattgtctctttttactctgacgtaattgggtactggaacacctcaggcaacctcttcaccaatgtaacttggacaaccccaggtactggcgaagtatctgcaggcgcaacacaaacgccaacctcagattacgtagtgccatacagctacacgcttatgccggcagccgatgtaaaagcccacgtcattgcgagtgcaggcgttggcaaaatagaccagacagggcttaccattccagaccccgttacccctgaaggcgacctaggtgaaccagaagccccagtgcaaggtgatgtaagcctaccttacactgaaaattttgccgccactgacgccgccaatttctttagcgccgcgtaccgcgatattactggctctgctggcaccagcacacccatgtaccaccgcgtaaccggcacggtggaaattaacgcacagcaattggatatgactggcgcacgcgtatcaattggcaacacaacgccaagtgtaagcacaaccggtgcagacaccactacaacgggcgtattagatttaagcgcgccctacaccgtaagctttaaagtggtaagcgtaggcggcaccctaactaagaaatttcaaatatatgtagacaacaatacctctgccagcggcgactctattcacggcggctcatcgcgcttttacagtgaaactttagactcgctagttgcaggccaaacctacacagtaaccggctttaccgccaccaacagctctttcataacattacgtaccgaaagtagcggccaaattgtattagatgacctaagtattcaagccgcagaataa

SEQ ID NO: 92 - protein, 425 aa, Microbulbifer degradans
MFKYALYVVALVAGVVVSLAACSKRATQQVETEFYEINERGGDDGRLLRVVNLNNQGVGSLRWALAQTGARKIIFDVGGVIDLEEKSLKIREAHVTIAGETAPSPGITLIKGGLRIETHNVKVSHLMIRPGDAGYSKGQGWKPDGITIYGSKARHVVIDHCSVTWAVDENIAVSGPADKGAEATAGKVLIRNSIIAEALSNASHPEGEHSKGILIHNNVQHVSLVNNLLAHNRRRNPYFKAGTTGIVIGNIIYNPGKRAIHMSSGRADASLPTLSITGNLFIPAANTSPNLSLISNYGKIYSSGNLVQGESRPITDGKSISLTAPPLQQVGINLTDTGTQNDFCQTLSNAGARPWDPDPIDIRIKTQLLAGEGRIIDSQSEVGGYPIHNVNNKETAEAGSTQGDGMLQFDTELLRKIPNLCSGMM

SEQ ID NO: 93 - DNA, 1278 bp, Microbulbifer degradans
atgtttaagtatgcgctatatgttgtggccttggtggctggcgtagtggttagcttagcagcctgcagcaagagagctacgcagcaagtagagactgaattctacgagattaatgagcggggcggagatgatggtcgcctgctacgcgttgtgaatttaaataatcagggggttggctctttgcgctgggcgttggcgcagacaggtgctagaaaaataattttcgatgtagggggggtgatagatctagaagaaaaatcgctcaagattcgtgaagcccatgtgacaatcgctggagagacggccccatcaccgggtatcacccttatcaagggcggactaagaatagaaacccacaatgtcaaagtttcgcaccttatgattaggcctggtgacgcagggtactccaaaggtcaaggttggaaacccgacggcataactatatatggcagcaaagcgaggcatgttgttattgatcattgctcggttacatgggctgtcgacgaaaatatcgcagtatctggcccagcagataagggggcagaggctaccgcgggtaaggttcttattcgcaattcaattattgccgaagcgctaagcaatgcatcccacccagagggggagcattctaagggcatactcatacacaacaatgtgcagcatgtaagcttggttaacaatttgttggctcacaataggcgaagaaacccttattttaaggcgggtacaacgggaattgtaattggcaatataatttataacccagggaaacgtgctattcatatgtcttcgggccgtgctgatgctagcctgccaacactgtcaattacagggaatttgtttattccagcagctaatacttcccccaaccttagtttgataagcaactatggaaaaatttattcgagtggaaacttggtgcagggggagagcaggccgataactgatggtaaaagtatttcattgactgcgccgccgctacagcaagtaggcataaatttaaccgatacaggtacacaaaacgacttttgccaaaccctaagcaacgcaggtgcccgcccgtgggaccccgacccgattgatattagaataaaaacacaacttttggctggcgaaggacgaattattgatagccagagcgaggttggaggctacccaatacataacgtcaataacaaagaaaccgctgaagcaggctctacgcagggggatggtatgttgcagtttgatactgagttattgagaaaaataccaaacctgtgtagtggcatgatgtaa

SEQ ID NO: 94 - protein, 772 aa, Microbulbifer degradans
MRDITMKNNKFRSSFTLKKLTPFFVAGTMLGGSNAWAGCDYTVTNQWGSGFTGNVRITNSGNTPTNGWAVNWQYAGDNRISNSWGAQLSGSNPYSATAESWNAVIQPSQSIEIGFQGTGDGNEIPTINGDVCQTSSGSTSSSSSSSTSSSSSSSSSTSSSSNSSSSSSSSSSSSSSSGSTTGYIHIEENELGFCYVQGSIDSNNGGFTGTGFANTDNVNGSQINWKVNVDFDGYYALEWRYANGSGTARTASVSANGAQSEISFPTTGSWDSWLLDSTTLFLKAGVNDVILSANTSSGLANIDSLTVHGDGVAAADCNTDGSSSSSSSSSSSSSSTSSSSSSSSSSSTSSSSGGPQILKAFPTAEGYGKITAGGRGGDVYIVTNLNDSGAGSLRQAVEASGPRTVVFEVSGTITLNKPLTIKNNNITIAGQTAPGDGITLRKHNFSIQADDVIVRYIRVRFGDETLTDSDAISMRYQKNIILDHVSASWGDDETLSLYHGENITVQWSMITETLNRGGEHAFAAIWGSPFSTFHHNLIAHNVARNVRFASGSGYTDYRNNVVYNWGYSSTHGGEAQQVGNANFNFTTVNMVGNYYKPGPRTESGVRSRLLTPNTRNGDADLGSFYVSGNHMVGSPNVTADNSIGVSNKNALISSPWNSMKIEGEQTAEQAYESVLAYAGASKVRDSVDTRIIEEVRTGTATYGGNGIIESQNEVGGWPQLRSETPPQDSDRDGMPDDWERANNLNPFNAADRNTKDSIGYTMLERYINGLVD

SEQ ID NO: 95 - DNA, 2319 bp, Microbulbifer degradans
atgagagatatcacgatgaagaataataaattcaggtcgtcttttacattaaaaaaactcacaccgttttttgttgcgggcaccatgcttggcggttccaacgcctgggctggctgcgactatacggtcactaatcagtggggctcaggctttactggcaacgttcgtataactaatagcggtaacacgccaacaaatggttgggctgttaactggcagtacgctggcgataatcgtattagtaatagctggggagcacagctttcagggtcgaacccatactctgccacggcagaaagctggaatgctgttattcagcctagtcagtccatagaaattgggtttcaaggtaccggcgacggaaatgaaataccaactataaatggcgatgtttgccagactagcagcggaagtacttcatccagctcatcttcaagtacgtcttctagcagctcttcaagctcgtccactagcagctcttcaaacagctcttctagctctagctcgtccagctcgtctagctcctcctctggctctacaactggatatattcatatagaagagaatgaacttggtttttgttatgtacaaggttccattgactccaacaacggtggctttaccggcacaggctttgccaataccgataacgttaatggctcacagattaactggaaagtaaatgtcgactttgatggatattatgcgctcgaatggcgctatgcgaatggctccggcaccgcgcgcactgcaagcgttagcgctaatggagcacaaagcgaaatttccttccctacaacaggttcgtgggatagctggttattagacagcactaccctatttttaaaagctggcgtaaacgacgtaatattgagcgcaaatacaagcagtggcctagcgaacatagattcacttacagtgcacggtgatggcgtagctgcggcagactgtaatactgatggaagctcaagcagcagctctagttcaagctctagttccagctcaacttctagtagctcctcaagttccagctcgtctagcacgtccagctcttctggtggcccgcaaatattaaaagcattccccaccgcagaaggctacggaaaaataaccgcaggtggtcgtggtggcgatgtctatatagttacaaacctgaatgactcaggcgcgggtagtttgcgtcaggccgtagaggcatctggccctagaaccgttgtgttcgaagtgtctggaaccatcactctaaataaaccactcacaatcaaaaataataacatcacaatagcaggacaaactgcaccaggcgatggcattacacttagaaagcacaacttttctatccaagctgatgatgtcatcgtacgttacatacgtgttcgctttggtgatgaaaccctaaccgattctgatgcgatttccatgaggtaccaaaaaaatattattttggatcatgtgagtgctagctggggagatgatgaaaccttatctctttatcacggcgaaaatatcactgtgcaatggagcatgattacagagaccctcaatcgtggcggcgaacatgcattcgcagctatatggggttcgccttttagtaccttccaccacaatttaattgctcacaatgttgcgagaaacgttcgctttgcgtcgggttccggttatacggattatcgtaacaatgtcgtatataactggggctatagcagcacacacggaggcgaagctcaacaagttggcaacgctaattttaatttcaccaccgtcaatatggtcggcaactattacaaacctgggccgagaactgaatctggcgttcgtagtcgactacttacacctaacacgcgtaacggcgatgcggacttaggtagtttttacgtttctggtaaccacatggttggcagcccaaatgtaactgcagacaactcgattggcgtatcgaataaaaatgccttaataagtagcccttggaattcaatgaaaatagaaggcgaacaaacagctgagcaagcatatgagtcagttcttgcttacgcaggtgcatctaaagtacgcgactcggtagatactcgtattattgaagaagtacgtacaggcacagctacttatggtggaaacggcataattgaatcgcagaatgaagtgggtggttggccacaacttagaagtgaaacgcccccgcaagacagtgatcgcgacggaatgccagatgactgggaacgcgcgaacaacctaaatccattcaacgcagccgatagaaacactaaagacagtattggctacacaatgttagagcgatatattaacgggcttgttgattaa

SEQ ID NO: 96 - protein, 511 aa, Microbulbifer degradans
MLRIPKAWLALPLVLGSTNLYAQVTCSISNTNVWNNGYTVNVNVTNTGSSQVGSWQVPINFSEPPQVSSGWNAILSTNGNTVTAGNIGWNGNLNPGQSASFGFQGGHDGSFVEPTCSGGGSSTSSSSSSSSSSTSSTSSSSTSSSSSSSSGGSELLIQENASGFCRVDGSIDNNNSGYTGSGFANTENQNGSAVEYALNVPSNGNYLLDARYASATTRSASVVVNGSSVGSFSFPSTGSWTSWTVDSANVPLKGGNNIVRIVATNSSGLPNIDSLKVIGTNPSAGSCSSNSSSTSSSSSSSSSSSNSGGKGSSCRSTGSQSVSSTIKVTSGTFDGNCKTYNPTSALGDGSQSESQKPAFRVENGATLKNVILGNNGVDGIHVYNGGTLDNIRWTNVGEDAMTVKSEGNVTVSNIEGYDGSDKFIQVNAVTNLKVSNCIVDKMGKFLRQNGGKTFAMSVTVDNCDISNMGEGVFRSDSPNATARITNSRLKNAGDICIGKWKSCTSSNITSF

SEQ ID NO: 97 - DNA, 1536 bp, Microbulbifer degradans
atgttgcgaatccccaaggcttggctggcacttccacttgtactgggaagtaccaatctatacgctcaagtaacttgcagtatctctaacaccaatgtttggaataacggatacaccgttaatgttaatgtaaccaacacaggctcttcacaggttggttcttggcaggttcctattaatttttctgagccacctcaagtaagcagcggctggaatgcaatattaagcacaaacggaaacaccgtaactgccggcaatattggttggaatggtaatttaaatcccggccaaagcgcctcctttggttttcaaggtggccacgatggcagctttgtggagcccacctgctcgggcggaggctctagcactagctcaagcagctctagtagttctagctcaacaagttctaccagttcttcatccacaagttcaagtagctcttctagctccggcggctctgaacttttaatccaagaaaatgcatccggcttctgccgtgtggacggatcgatagataacaataactcaggctataccggtagtggctttgccaacaccgagaaccaaaacggttccgcagttgaatacgcacttaacgttccctctaatgggaattatctcctcgacgctcgatatgcaagcgctactacacgatcggctagcgtggtagttaatggatcttcagtaggcagctttagttttccatctacgggttcgtggacaagctggacagttgactccgccaacgttccgttaaaaggcgggaataatattgttcgaattgttgcaactaacagcagcggattacctaatattgattcattaaaggtaataggcaccaacccgtcagccggcagttgttcaagcaactcgtcatccactagttcatcgtctagctcaagttcatcaagcagtaactccggtggcaaaggctctagctgccgttctacaggcagtcaatctgtttcctctactattaaagttactagcgggactttcgatgggaactgtaaaacgtataaccctacaagtgcccttggcgatggcagtcaatcagaaagccagaaaccggcattccgagtggagaacggcgcaacactcaaaaacgtgattctaggcaacaatggcgtagacggtattcatgtttataacggcggcaccttggataacatccgctggaccaatgtgggtgaagatgcaatgaccgttaaatctgaaggaaacgttaccgtttcaaatattgagggttatgacggttcagataaatttatacaagtaaacgcagttaccaacctaaaggtttctaattgcattgtagataaaatgggtaaatttttacgtcagaatggcggtaaaactttcgctatgtctgtaaccgtagataattgtgatatctcaaatatgggtgaaggtgttttccgctcagacagcccaaatgcaacagcgagaatcacaaatagccgattaaaaaatgcaggcgacatttgtattggtaagtggaaaagctgcacatcttccaacattaccagcttctaa

SEQ ID NO: 98 - protein, 455 aa, Microbulbifer degradans
MIMMRNKILLALVLCGASASAFAASNRPSGYTTICKTDQTCSVSSSTNVAFGAAGKFVYKVINGTFTCNTSTFGSDPNPAKSVKECSVPTNGSSSTSSTSSSSSSSSSSSSGSSSSCGTGGGATVCLSAGGGSNDIDLTWTVSGSISSAQVYRDTDSNPSGRTRIAQLGGDARSYSDTNVSAGKQYYYWIKFGANGSNYNSNAASATYSGSSSSSSSSSSSSSSSGGSAECKAGATISGKTVDCGGKEIGLSCSGDSETQPPVLTLKNATIKNLVISAKGGSDGIHCTGNCTMENVVWKDICEDAATNKTDGITMTIIGGSAYNSTSGYGGKPDKVFQHNSKNSTTVIKGGFTLTGEHGKLWRSCGNCTNNGGPRNVTIDNVKVDAKIGSIVGVNRNYGDKATIKNLKIKDYKSGSPKVCEEYKGVQKGSGESSKYGEYWDTANCDVSKSDVSAL

SEQ ID NO: 99 - protein, 60 aa, Microbulbifer degradans
MPHELLEPDELLELELEELLVLLVLEEPLVGTEHSFTDLAGLGSLPKVDVLQVKVPLITL

SEQ ID NO: 100 - DNA, 1368 bp, Microbulbifer degradans
gtgataatgatgcgtaataaaatcctattggcgcttgtattgtgtggagcttctgcctctgcctttgcggctagtaatcgtcctagtggttacacaactatctgtaaaaccgatcaaacttgttctgtaagctcgtctaccaacgttgcgttcggcgctgctggtaagtttgtttacaaagtaattaacggtacctttacttgtaatacatctacttttggcagcgatcctaaccctgctaaatctgtaaaagaatgttctgtacctactaatggttcttctagcactagcagcaccagtagttcttctagctctagttcaagtagctcatcgggttcaagcagctcatgtggcactggtggcggcgcaactgtatgtttaagtgcaggtggcggcagtaacgatatcgatttaacttggacagtatctggttctatttctagcgctcaggtttaccgcgacacagattctaaccctagtggtcgcacacgtattgctcaattaggtggcgatgcaagaagctatagcgatacgaatgttagtgctggtaagcagtactactactggattaagtttggcgccaacggctctaactacaattcgaatgcggcttctgctacctatagtggttcaagtagctcatcgagttcttcaagctcttctagttcctcatctggcggctcggctgaatgtaaagctggcgctactatttctggtaaaaccgtagattgcggtggtaaagaaattggcttgtcgtgctcgggtgatagtgaaactcaaccaccagtattaacgcttaaaaatgccaccattaaaaacttggtaatttctgctaaaggtgggtccgacggtattcactgtactggcaactgcaccatggaaaatgttgtttggaaagatatctgtgaagatgctgctaccaacaaaaccgacggtattaccatgaccattattggtggtagtgcgtataactctacaagcggttacggcggcaagccagataaggttttccaacataactctaaaaacagtactactgtaattaaaggcggctttacattaacaggtgagcacggcaaattgtggcgttcatgtggtaactgtactaataacggcggcccacgtaatgtgactatcgacaacgttaaagtagacgcgaaaataggcagtattgttggcgttaaccgcaactatggcgataaggcaacaatcaaaaacttaaagattaaagactacaaatctggtagccccaaagtgtgtgaagaatacaagggtgtacaaaagggtagtggcgagtcttctaagtatggcgaatactgggatactgcaaactgcgatgtaagtaaatcagatgtgtctgctctttaa

SEQ ID NO: 101 - protein, 424 aa, Microbulbifer degradans
MFNKILVAVGLLAASLSVHAATNRPSGYTTICKVGETCSVSQSTNVAFGASGQFVYKVLNGSFSCSVSTFGSDPIPSKSVKECSIPSNGSSSSGSSSSSSSSSSGSSSGGGCGSGGGSTVCLSASGSSNGINLSWSVSGSISSVQLYRDTDSNPSGRTRIASVSSSTTSFSDTGAASGTTYYYWVKYYVNGTAYNSGVASAVRGSSSSSSSSSSSTSSSSGGKGSSCSSTGSQSVSSTIKVTSGTYDGGCKTFNPTSALGDGSQSESQKPAFRVENGATLKNVIIGNNGVDGIHVYNGGTLNNILWTNVGEDAMTVKSEGNVTVTNVEGYDGEDKFIQVNAVTNLKVSNCIVNKMGKFLRQNGGKTFAMSVSVDNCDISNMGEGIFRSDSPNATAVITNSRLRNAGDICIGAWKSCKSSNISSF

SEQ ID NO: 102 - DNA, 1275 bp, Microbulbifer degradans
atgtttaacaagatactcgttgcagtaggattacttgcggctagcctttctgtgcacgccgcaacaaaccgcccaagtggttatacaacaatttgtaaggttggtgaaacatgctcggtaagtcagtctacgaatgtagcctttggcgcgtctgggcagtttgtgtataaagtattaaacggtagcttttcttgtagtgtttctacgtttggtagtgaccctattccttctaaatctgtaaaagaatgttcaatcccatcaaacggctctagctcttctggctcgtcttcatcttcgtctagcagctcttccggtagctcttctggtggtggctgtggcagcggtggtggttctacggtgtgcttatcggcctcgggttctagcaatggtatcaatttaagttggtctgtatctggttctatatcttccgtgcagctttatcgcgataccgattcaaacccaagcggtcgcacgcgtattgctagtgtatctagctctactactagctttagtgataccggcgcggcatcgggcaccacttattactactgggttaaatattatgtaaatggtactgcttacaactcgggtgttgcttctgcggtgcgcggttcttctagctctagtagttcaagttcttccagcacttctagcagttctggtggaaaaggttctagttgtagctctactggtagccaatctgtgtcttctactattaaggtaaccagcggtacttacgatggtggttgtaaaacatttaaccctaccagtgctttgggtgatggtagccaatctgaaagccaaaaacctgctttccgtgtagaaaacggtgcaacgttaaagaatgtaattattggcaataacggtgtggatggtattcacgtttacaacggcggtacgttaaataatattctttggactaacgtaggtgaagatgccatgaccgttaagtctgaaggtaacgtgacggtaaccaatgttgaaggctatgacggcgaagataagtttattcaggtaaacgcagtgactaacttaaaagtttctaactgtattgtgaataaaatgggtaagtttcttcgtcagaatggtggtaaaacatttgccatgtcggtaagtgtagataactgcgatatatctaatatgggtgaaggtatcttccgttcagacagcccgaacgctacagcggttattactaacagccgtttacgcaacgctggggatatttgtattggggcttggaaaagttgtaaatcttccaatatcagcagcttttaa

SEQ ID NO: 103 - protein, 392 aa, Microbulbifer degradans
MKKLILMVALLAFSVSSFAALSSGRYIIVSKLNGNALDVDSFSTADGANVMQWFALGGVNQQFDVAVLSDGSYSIRPVHSGKSLDVYAWNADDGAELRQWAYTGADNQRWYIDNQSGDYYSITSKFSGRALDVWGMSMYTGADVRLYSYWGGAGQLWTFQKVGSSSECYAGATLTNRFVDCGGKTIGLSCVGDSETQGAVLTLKNSSIRNVKLAANGGADGIHCTSGNCTLADVVWNDICEDAATNKSEGGTLTIVGGSAYNSTGGYGGTPDKIFQHNSKNSTTIVAGGFTAYGTHGKLWRSCGNCTNNGGPRNLLVYSVNIDASIGAIAGVNRNYGDRATIRDLKIKNYSSGSPHVCDEYQGVQKGNSSTKYGEYWNTASCDVSRSDVSGL

SEQ ID NO: 104 - DNA, 1179 bp, Microbulbifer degradans
atgaaaaaacttatccttatggtggcgctgttggcttttagtgttagttcttttgctgcactgtcttcaggccgctacattattgtttctaaacttaatggcaacgcgttagatgtagatagctttagcaccgcagatggcgccaatgttatgcagtggtttgctttgggtggtgtgaaccagcagtttgacgtggcagtgcttagcgatggcagttactccatacgaccagtgcacagcggtaagtcattagatgtatatgcgtggaacgcagacgatggtgcggaacttcgtcagtgggcatacacaggcgcagataaccaacgttggtatatcgataatcaaagtggcgattactattcaattacgtctaaatttagcgggcgcgcattggatgtatggggtatgagtatgtacaccggcgcagatgtccgcctttattcatattggggcggcgcggggcagctgtggaccttccaaaaggtaggtagctcaagtgagtgttacgcaggtgctacgttaacaaaccgctttgtggattgtggcggcaaaacaataggccttagttgtgtaggcgatagtgaaactcaaggcgcggtgctaacccttaaaaactcgtccattcgcaatgttaagttggctgcaaacggtggtgcggatggcattcactgcactagtggcaactgcacattagccgacgttgtttggaacgatatttgtgaagatgctgccacgaataagtctgaaggtggcaccctgactattgtgggtggttcggcgtataactctactggcgggtatggtggtacaccggataaaatttttcagcacaactcgaaaaacagcacaacaattgttgccggcggcttcactgcatatggtacccacggtaagttgtggcgctcgtgtggtaactgtacaaacaacggcggtccgcgtaatttactggtttatagcgtgaatattgacgcaagtattggcgcaattgctggtgttaaccgcaattacggcgatagagcgaccattcgcgacctaaaaataaagaattattcttctggcagcccgcatgtgtgtgacgaatatcaaggcgtacagaagggcaattcttctacaaaatatggcgagtactggaataccgcaagttgtgatgtttcgcggtcagatgtaagtgggctttaa

SEQ ID NO: 105 - protein, 733 aa, Microbulbifer degradans
MFRYILTAFALVAAASCAQAATNRPSGYTTICKTNQTCSVSSPTNVAFGASGKFTFKVLNGSFVCSVATFGSDPNPAKSAKECSIPSDGSSSTSSTSSTSSSSSSSSSSTSSSSSSSSSSSSSSSSSSSSSSSGSSQAGCGSGGGATVCLSATDTASAINLNWTVSGSLSSVQVYRDTDPNPSGRTRLTSLSPSVTSYTDNNAQAGTTYYYWIKFGANGSNYNSGAASAVIANTGNDDEGCGSDVCLTATANIGSIGLSWGSSAALTSVQIYRDTDSNPSGRTRIASLSTSATSFTDSTTAVGTTYYYWVKYGLNGSQLNSNVASATALQNNTGNASCPGETSGETAATVYYVTPNGSASASGNSFASAMDIDTALSIVGAGQMILMQPGTYTVAYSAGNKNTKVLSRSGAAGAPIKMVAANCGRAVFDFSFPEREWVQDSYGFFLTGDYWYFKGIEITRAGYQGVYVTGAHNTFENCAFYYNRNTGLEINKGGSYTTVINSDAYRNYDPKKNGSMADGFGPKQTQGPGNKFIGCRAWENSDDGFDLYDSPEEVTIENSWAFRNGVDVWGYGGFAGNGNGFKLGGNHVAANNRITNSVAFGNPVKGFDQNNNAGGITVLNCTAYANGTNYGFGNNLNSGEQHYFRNNVSVSGAVNISNADNKYNSWNGGVTASTADFENVDLSKATAARNIDGSLPNNGLFRLKSGSDLIDAGVEVGLPSNGSAPDMGAFEAN

SEQ ID NO: 106 - DNA, 2202 bp, Microbulbifer degradans
atgtttcgatacatccttactgctttcgcattggtggcagcggcttcctgcgcgcaagcagctaccaatcgccctagcggttacaccaccatatgtaaaaccaatcaaacctgctctgtttcaagccctaccaatgtggcgtttggcgcatcgggtaaatttacctttaaagtgcttaatggctcttttgtttgtagcgtagccacttttggctccgaccctaacccggctaaaagtgctaaagagtgctctattccgtcggatggctcttccagcacctctagtacttcgagcacatcgtctagttctagtagttcatctagcagcacaagttcaagcagcagctctagcagttcttctagctcttcgtcttccagtagctcaagttctagttcaagtggctcttcgcaagctggctgcggtagtggcgggggagcaacggtttgtttatcggcaaccgatacagctagtgctatcaatttaaattggacagtgagtggctcgctgtcgagcgtgcaggtgtatcgcgataccgatcccaacccaagtggacgtacgcggttaacgtcgttaagcccttcggtaacaagctacaccgacaacaacgcacaggccggtacaacctactattactggattaaattcggcgcaaacggcagcaactataattccggtgctgcgtcggctgtaatagccaataccggtaacgatgatgaaggttgtggtagtgatgtgtgcttgacggcaaccgctaatattggctctataggcttaagctggggctcttctgccgctttaaccagcgtacaaatttatcgcgatacagattcaaacccaagtgggcgtacacgtattgcatcgcttagcacttctgcaaccagctttaccgattcaaccactgcagtaggcacaacgtattattactgggttaaatacggcttaaacggcagccagctaaactctaatgttgcatctgccactgctttgcaaaataacactggcaacgcaagttgccccggtgaaacaagtggcgaaactgcagcaaccgtgtattacgtaacaccaaacggttcggctagtgcaagcggcaatagctttgcatctgcaatggatatagacacagcactttcaattgtaggcgcggggcaaatgatattaatgcagcctggtacctacaccgttgcctatagtgcgggtaataaaaataccaaagtgctttcgcgctcgggtgccgctggtgcacctatcaaaatggtggcagccaattgcggtcgtgcagtgtttgatttttcgttcccagaacgtgagtgggtgcaagattcttacggctttttcttaactggcgattactggtattttaaaggaatagaaattacccgtgcaggctaccaaggtgtgtatgtaacgggtgcgcacaacacatttgaaaattgcgccttttattacaaccgcaatacaggtttagaaattaacaaaggcgggtcttacaccaccgtcattaattcagatgcctatcgcaattacgatcccaagaaaaacggcagcatggccgatggctttggccctaaacaaacccaaggcccaggcaataaatttattggttgccgcgcgtgggaaaactccgacgatggatttgacctgtacgatagcccagaagaagtaactattgaaaatagctgggcatttcgcaacggtgtagatgtatggggttacggtggttttgcgggtaatggcaacggctttaaattgggcggtaaccacgtggctgcaaacaatcgtattaccaactcggttgcgttcggcaaccccgtaaaaggttttgatcaaaacaataatgccggcggtattacagtgcttaattgcacagcctacgccaacggcactaactacggctttggcaacaacttaaactcgggtgagcaacactacttccgcaataatgtttctgtatctggcgctgtgaatattagcaatgccgacaacaaatacaattcgtggaacggcggagtaacagcatccacggcagattttgaaaacgtagatttatccaaagccaccgctgcacgtaacatagatggcagcctgccaaacaacggcctattccgcttaaaaagcggcagcgatttaatagacgccggtgtagaggtaggtttaccaagtaacggcagcgcgcccgatatgggagcgttcgaagctaactag

SEQ ID NO: 107 - protein, 700 aa, Microbulbifer degradans
MKNVFNTQKTKRHCNYAYNAKAAKPFSQKALVQKCAAAALSVGLLGAVGNAYAISCSATADTWGGGYVLNVTVTNDTNNAISNWALALNYDQAAAITNSWNASVSANGNVVNATNIGWNGNLAAGQSTSFGLQGTYTGNFSLPVCVGQGQSSSSSSSTSSSSSSSSSSSSSSSSSSSSSSSSSSSSSSSSSSSSSSTSSTGGSSELTIQEDNSGFCGVDGSIDSNNSGFTGSGFANTDNATGKSVDWSVSVPYSGNYLLEWRYANGSGNNRAGAIEVNGNARGNQSFPTTGAWTSWTTASANVSLDAGTNLISLVASTGEGLGNIDSLTVIGNDIQTGACDSTGSSSSSSSSSSSTSSSSSSSSSSTSSSSSGAPMLPQAGNPINGKFGKYKSWQKGSLSADKQFADILLSHQYTNGGFPKNQAYDSMGSGGNSAGTIDNDATTTELLFLADVYQRTGETKYRDGARKALDFLLDMQYSSGGWPQYYPVRSGYYEHVTFNDDAMARVLIVLDKAKQGVAPLNGDLLTSNQRARLSSAVNKGVDYILKSQWRQNGTLTVWCAQHGKDDYLPKKARAYELESLSGSESVLVVAFLMSQPQTPEIKTAVKAAINWFRSPNTYLAGYTYDSSRKGDGNSPIVAKSGSKMWYRFYDLNTNRGFFSDRDSRKVYDILDISTERKDGYRWGGDYGSGIISYAESVGY

SEQ ID NO: 108 - protein, 72 aa, Microbulbifer degradans
MVNSLLPPVELVDEDDELEDEELLELLEELLEELEDELLDELEELDELLLVLLLEEELWPWPTQTGKLKLPV

SEQ ID NO: 109 - DNA, 2103 bp, Microbulbifer degradans
atgaaaaacgtatttaatacacaaaaaaccaagcggcattgcaactatgcctataacgcgaaagctgccaaacccttcagccaaaaagcactggtacaaaagtgtgcggctgcggcattgtctgttggcttactgggggccgtgggtaatgcgtatgcaatatcctgttcggcaactgctgatacctggggtggtggctatgtgctaaatgtgaccgttactaacgacacaaataatgcaattagcaattgggcgctagctttaaattacgatcaagctgcagccataactaattcgtggaacgcgagtgtgtctgcaaatggcaatgtggttaatgctaccaacattggttggaatggcaatttagcggctggccaaagtacaagttttggtttgcaaggcacctataccggcaactttagtttacctgtctgtgttggccagggccaaagctcttcctctagtagcagtactagtagtagttcgtccagctcttcgagttcatccagcagttcatcttccagctcttcaagtagttcttcaagcagctctagtagttcttcatcttctagctcatcgtcttcgtccaccagttcaactggtggaagtagtgagttaaccattcaagaagataatagcggcttttgcggggttgatggttcaatcgattccaataattcaggctttaccggaagcggcttcgccaataccgataacgcgacaggcaaaagcgtagattggagtgtgagcgttccttatagtggcaactatttgcttgaatggcgttacgcaaatggttccggtaataaccgtgctggcgcgattgaagtaaatggtaacgctcgtggtaatcaaagctttcctactacaggggcctggactagctggacaacggcaagtgctaacgtaagtttggatgcaggtacaaacttaattagcttggttgcatctacgggcgaaggcttagggaatattgattcacttactgtcattggtaacgatattcagaccggcgcttgtgattctacagggtctagctcttccagtagctctagttcctccagtacttctagctcaagttccagctccagttcaagtaccagtagttctagcagcggtgcgcccatgttacctcaagctgggaaccccattaatggcaagtttggcaaatataaatcttggcaaaaaggaagcttgtctgccgataagcaatttgcagacatccttctatcgcaccaatataccaatggcggatttcccaaaaaccaagcctacgacagtatgggtagcggtggtaacagtgcgggcacaatcgacaacgatgccacaacaacagagttgttattcttagctgatgtgtaccagcgtactggtgaaaccaaataccgagacggtgcgcgtaaagcgttagatttccttttggatatgcagtattcatcgggcggctggccgcaatactaccctgtgcgcagtggctactacgagcatgtaacatttaacgacgatgcaatggcgcgagtgctaattgttttagataaagcgaaacaaggtgtggcgccgctaaatggcgatctattaacatctaaccagcgtgcgcgtttaagcagtgcggttaataagggcgtggattacattcttaaatcgcagtggcgtcaaaacggaaccttaactgtttggtgtgcgcaacatggtaaagatgattatctacctaaaaaggcgcgtgcttacgagctggaatcgttgagtggtagcgaatcggtattggtagttgcattccttatgtctcaacctcaaacccctgaaattaaaacggcggttaaggctgctatcaattggtttagaagccccaatacttacttagctggttacacttacgattcatctagaaaaggcgacggcaacagccccatcgtcgcgaaaagcggtagtaaaatgtggtatcgcttctacgacctaaatactaaccgtggcttcttcagtgatagagatagcagaaaagtttacgatattttagatatttctacagagcgtaaagatggctatcgttggggcggtgattatggctccggcatcattagttacgcggaaagcgttggttactaa

SEQ ID NO: 110 - protein, 96 aa, Microbulbifer degradans
MSVPALPPEELLELEDELLELEDELLELDELLELDELLELVELLELEELVEAFISLAGPELPPPQALNSVAASASVIRRRKFIIVALYVFILRAHK

SEQ ID NO: 111 - protein, 574 aa, Microbulbifer degradans
MNFLRLITLALAATLLSACGGGSSGPAKEINASTSSSSSSSSTSSSSSSSSSSSSSSSSSSSSSSSSSSSSSSSSGGSAGTLTIQESEKGFCTVNGEIVNNHEGYSGTGFVDTANAEGASITWKVDVDGGNYDVSVRFANGSTARGATLSSNEINTTYGFATTGDWATWADETHTVSLAAGENTIQLSALTAGGLPNVDAITIAGAGVLAADCATEHTGPMLSQTGNPIYTELNNYKSWLTGSGTTAAKLAADKTIADNMITWQMPHGGFYKYGVSKYSSAWNGSDARSGWTGANGVELGTIDNDATVSELLFLADVYKRSGETKYRDAARSALEFLLTMQYSTGGWPQVYPARTGTSYSNHVTFNDNAMARVLILLDKAARLEAPLDGDIFTTDQHTRITTAINGGIDFILNAQIVQGDVKTVWCAQHDPYTYEAKAARSYELASKSGKESVLVVAFLMTRPQSEAIENAVKAALAWYRNPNVQVANTEYVKRTNNDDNYNPIQTKAGSTMWYRFYDLDQDVGFFSGRSASDNPAGNGKQYDIMLIEPERRYGYEWGGNYGKKIIDYANSVGY

SEQ ID NO: 112 - DNA, 1725 bp, Microbulbifer degradans
atgaattttctacgccttattacactcgcactcgccgcaacactattaagtgcctgcggtggaggtagttctggcccagccaaagagataaacgcttccaccagttcctctagctctagcagctccacgagttctagcagctcatccagctctagtagttcgtctagctcaagcagctcgtcttccagttccagcagctcatcctctagctctagcagctcttctggtggtagcgccggcacactcactattcaggaaagcgaaaaaggcttttgcactgttaacggtgagattgtgaataatcacgaggggtatagcggtacaggttttgtagacaccgccaatgccgaaggcgccagcattacttggaaggtagatgtcgatggcggcaattatgatgtaagtgtgcgattcgcaaacggttccactgcacgcggcgcaacgcttagcagtaacgaaataaataccacctatggttttgctaccactggcgactgggccacatgggcagacgaaacccacaccgtttcgttagccgcaggcgaaaacaccatccagctaagtgcacttaccgcgggtggcttacccaatgtagacgctattactattgcaggtgcaggtgtactcgcagcagactgcgccacagagcatactgggccaatgctttcgcaaacaggcaaccctatttataccgagttaaataattacaagtcctggctaacgggtagcggcacaacagcagccaaattagccgcagataaaacaattgccgacaatatgattacctggcaaatgcctcacggtggtttttataaatacggcgtatctaaatacagctcggcttggaacggtagcgatgcccgctctggctggactggggccaacggcgttgagcttggcacaattgataatgatgcaaccgttagcgaattattatttttagcggacgtatataaacgcagcggtgaaactaaatatagagatgccgcaagaagcgcgttggaatttttacttaccatgcaatattccactggcggttggccacaggtttaccctgcgcgcactggcaccagttactccaatcacgttacgtttaacgataacgccatggctcgtgtacttattttattggataaagccgcgcgattagaagcaccactcgatggcgacatttttaccacagaccagcacacgcgtattactaccgcaataaatggcggcatcgattttattttgaatgcgcaaatagtacagggcgacgtgaaaaccgtttggtgtgcgcaacacgacccttatacctacgaggcaaaagcagctcgctcttatgagttggcctctaaaagcggtaaagaatctgtattggttgtagcgtttttaatgacacgcccgcaaagcgaagccatagaaaatgccgtgaaagcagcccttgcttggtaccgcaacccaaatgttcaagtcgccaacaccgagtatgtaaaacgcacaaataacgatgacaactacaacccgatacaaacgaaagcaggtagcactatgtggtaccgcttttacgatttagaccaagacgttggattctttagcggccgctctgcaagtgacaacccagcaggtaacggtaagcaatacgacattatgcttattgaacccgagcgcaggtatggctatgaatggggtggcaattacggcaaaaaaataatcgattacgctaattcggtagggtattaa

SEQ ID NO: 113 - protein, 463 aa, Microbulbifer degradans
MYKISRRTTLKGLGLTCLAGCTTSLPTLEQDPWAFAQNIADNTTIPTFPNKEFNLLEFGGKEGSDNTLAFKKAIAACSKAGGGKVVVPAGRFETGAIHLESNVNLHISEGATIAFFTDPKYYLPAVFTRWEGMECMGYSPLIYAYGKTNIAITGKGTLDGQADPTHWWAWKGNKEWGVEGYPSQKESRNQLFAQAEAGDPVRERVYADGHYLRPSFVQPYKCENVLIEDITIINAPFWLLHPTLSQNVTVRGVHLESLGPNSDGCDPESCKNVVIENCFFNTGDDCIAIKSGRNNDGRRLATPTENVIIRNCKMEAGHGGVVIGSEISGGVRNVFAENNVMSSPDLEKGIRIKTNSVRGGLLENIYVRNCTIGEVQQAIVINFQYEEGDAGKFDPTVRNVEIRNLVCQHALQVFNIRGFERAPIQNFRIIDSTFVRGDNPGVIEHTTGLVIDNVQVNGKAFNI

SEQ ID NO: 114 - DNA, 1392 bp, Microbulbifer degradans
atgtataaaatttcacgccgcacaacactcaaaggcttaggcctaacttgcctagccggctgcaccaccagcctacccacactagagcaagacccatgggcttttgcacaaaacatagcggacaacaccaccatccccacattcccaaacaaagaatttaatttactcgaattcggcggcaaagaagggagcgacaacaccctcgccttcaaaaaagcgattgcagcatgcagcaaagcaggtggcggcaaggtggtagtacccgcaggacgatttgagacaggcgccatccacttagagtcgaacgttaaccttcatattagcgaaggcgctaccatcgccttttttaccgaccccaaatattacctgcctgcggttttcactcgctgggaaggcatggagtgcatgggctactcaccccttatatacgcctacggcaaaaccaacatagccattaccggtaaaggcaccctcgacggtcaagccgacccaacgcactggtgggcatggaaaggcaacaaagaatggggcgtagagggctacccaagccaaaaggaaagccgcaaccaactatttgcccaagcagaagctggcgaccccgttagagagcgcgtgtatgcagacggccactacctgcgcccctcgtttgtgcaaccctacaagtgcgaaaacgtgctgatagaagacataactattatcaacgctcccttctggttgctacaccccaccctttcacaaaacgtcactgtacgcggtgttcacctagaaagcctaggccccaactcggatggctgcgatcctgaaagctgtaagaatgtagttatcgaaaactgcttttttaataccggtgacgactgtatcgctattaaatctggccgcaacaacgatggccgcaggcttgccacacctaccgagaacgtgattattcgcaactgtaaaatggaagcgggtcacggtggcgtagttataggctcagaaatttctggcggcgtgcgcaatgtgtttgccgaaaataacgtaatgagcagccccgatttagagaaaggcattcgcattaaaaccaactctgtgcgcggcggactgctagagaacatctatgtgcgcaactgcaccataggcgaagtacaacaagccattgttattaacttccaatacgaagaaggcgatgcgggtaaatttgaccccaccgtgcgcaatgtagaaatacgcaatttggtctgccagcacgccttacaagtgtttaacatccgcggttttgagcgcgcccccattcaaaactttaggataatcgacagcacctttgtgcgtggtgacaacccaggcgtaattgaacataccacagggttagttatcgacaacgtccaagtcaacggcaaagcgtttaacatctag

SEQ ID NO: 115 - protein, 1084 aa, Microbulbifer degradans
MLDMTKRTLSALLALCATLTACGGGDITSGGDAIPAVNQPAPVQEPEPEPEPQPEPEPEPEPEPEPEGAWTCPETGFYFCDDFEDGTFDDKWDDLIATYDLPSPGVFDILDEASGKSLRFTAGTRGGDLADGELIVVKDTAFENVTNADYSLEYRIRPRNNGNTGNKYLHAMSRYEGPKEYYFGGLSMQGSTASTQVEAGFVLPENTTSISNRLVQAKYPLELGTTGMSDGYWYEVRFDMIGNTGTIYLDGEPQGSFTDADGLYPLTGKIGFMTYNRSFEIDWVRVGDPAIKPVQLSLDYASPLWEAAADQDPLNVTVTAIQSDGVTADTFTAVSSDTNVVTTSIANNVVTITPVAQGSATVTFTAGSDANRVKTIDVEIARAFVMSTTDYGDIASKVTPTVGMTDANPDAHLSITFDSAPTLSGVGSIRIYNAADDSEVDVIRLTDESDALGYAGQANKRELNTTPVYLDGNTLHVSPHSNALAYGQDYYVAIGDNVLTGATLNTIAFDGLGKNAGWTFSTKASAPTGNTVTVDDDASADFSTVQGALNYAMANTTDDSITINIANGNYYEPLYLAERNNVTLKGESRDGVVIHYNNHEAMNGGSTGRANFYVANSDMLTLETLTLKNGHQRTGGGDQAETIYFNSSSNTDRLIAKGAAFISEQDTLLLKGYNWFYNSLVVGNVDFIWGYSAVTLFEETEIRSIADSKPGAGDSGGYILQARTPLETDLGFVFLNSELTKATGVNGNEIGDGKTYLARSGGSTGYFDNISFINTKMGSHIADIGFAYADINGQPAPNPAVATADAGWREFGSMDSAGTALDVSARCGDSGSCIQLTQAQVDAQYCNRAQIFASWNDWTGWDPLPEDTSDDACADPVIPGAVTWTGIAMSLGGSTTSVSGNITEQTDSNITFTADGGKFESSKLSTYFAYQELTGDFVISAKAKTIGLLRENGSYQFPTGILMCVCDAAAATTGLMGHASLNDITVDTTVNLVATYGHIQTTAGSWNKTGTTDVTAGDNLYIQLERAGNSYTARYSTDGGATYSNIGGSSFTDTLPDTLKVGFFATPNNTGEQTFVYEDIQITQ

SEQ ID NO: 116 - DNA, 3255 bp, Microbulbifer degradans
atgctcgatatgacaaaacgaactctatctgcgttgttagccctgtgcgcaacattaacggcttgcggtggtggcgatataaccagcggcggcgatgctataccggcagtaaaccaacccgccccagtacaagagcctgaacctgaacctgaaccacaaccggaacccgaacccgaacccgagcccgagccagaaccagagggcgcgtggacctgcccagaaacaggcttctacttctgtgacgactttgaagacggcacgtttgatgacaagtgggacgatctcattgccacatacgacctaccaagccctggtgtattcgacatattagacgaagcaagcggcaaatctttgcgctttacagcaggcacccgtggcggtgacttagcagatggcgaacttattgttgtaaaagatacagcattcgaaaatgtaaccaacgcagattactccttagagtaccgtattcgcccgcgcaacaacggcaacacaggcaacaagtacctgcacgctatgtcgcgctacgaaggccctaaagaatattactttggcggtttaagcatgcaaggctctactgcaagtacgcaagtagaagcaggtttcgtattgccagaaaacaccactagcattagcaaccgcttggtgcaggccaagtacccgttagagctaggtacaacaggcatgagcgacggctactggtacgaagtacgcttcgatatgataggcaatacaggcaccatttacctagatggcgaaccacaaggcagctttaccgatgccgatggcctttacccattaacaggtaaaattggctttatgacttacaaccgctcattcgaaattgattgggtgcgagtaggcgacccagctattaagcctgtacaactttcactggattacgccagcccgctatgggaagcagcggcagaccaagacccgctaaacgtaacagttactgccatacaaagcgatggcgtaacagcagatacctttaccgcagttagcagcgataccaatgtagtaaccacaagtattgcaaataacgtagtaaccattacccctgtagctcaaggtagtgccaccgtgacctttaccgctggttcagatgctaatcgcgttaaaacaattgatgtagaaattgcacgcgcgtttgttatgtctactaccgactacggcgatatagcttctaaggtaacaccaactgttggtatgactgacgccaacccagacgcacatttaagcattacattcgatagcgcacctaccctaagcggtgttggctctatacgtatatacaatgcagcagacgatagcgaagtagatgttattcgccttaccgacgaaagtgatgcattgggttacgccggccaagccaacaagcgtgaattaaataccacaccggtttacttggatggcaacaccctacacgttagcccacacagtaacgcacttgcctacggccaagactactacgttgccattggcgataacgtacttaccggcgcaacactaaacaccattgcgtttgatggtttaggtaaaaacgcgggttggactttctctaccaaagcctctgcccctaccggcaacaccgtaactgtagacgacgatgcaagtgcagatttcagcacagtacaaggtgcgttgaactatgctatggcaaataccacggacgattcaatcaccattaacattgctaacggcaactactacgagccgctatatctagcagagcgcaacaacgtaacgctaaaaggtgaaagccgcgacggcgttgttattcattacaacaaccacgaagccatgaacggtggcagcactggccgcgcaaacttctatgttgccaactcagacatgctaaccctagaaacgctaacccttaaaaacggtcatcagcgcactggtggtggcgaccaagcagaaactatctacttcaatagcagcagcaataccgatcgcttaattgccaaaggcgctgcttttattagtgaacaagatacgctgttacttaaaggctacaactggttctacaactcgcttgtggtaggtaacgtagactttatttggggctacagcgcagtaaccttgtttgaagaaacagaaattcgatctattgccgactctaaaccaggtgcgggcgactcgggtggctatattctgcaagcgcgtacgccactagaaacagaccttggctttgttttcttaaatagcgaattaacaaaagctaccggcgtaaacggtaacgaaattggcgatggcaaaacctaccttgcgcgcagcggcggcagcacgggttacttcgataatatttcgtttattaacaccaaaatgggtagccatattgccgacataggcttcgcctacgccgacattaacggtcaacctgcccctaacccagcggtagctactgctgacgcaggctggcgtgaatttggcagcatggattctgcaggcacggctctagatgtatctgcacgctgcggtgatagcggcagctgtatccaacttacgcaagcacaagtagatgcgcagtactgtaaccgcgcgcaaatttttgctagctggaacgattggacaggctgggacccgttgccagaagatacctctgacgatgcctgtgctgaccccgttatacctggtgcagtaacgtggactggcattgcaatgagccttgggggttctacaacatctgtttccggcaacattaccgagcaaacagacagcaatattacattcactgcagacggcggtaagtttgaatcgagcaaactttcaacttacttcgcttatcaagaattgactggcgactttgtaattagcgccaaagctaaaaccattggcttactgcgcgaaaacggcagctaccagttccctacaggcatattgatgtgtgtttgcgatgcggcagcggcaacaactggcttaatgggccacgccagcctcaatgacattacagttgatactactgtgaatttagttgccacctacggccacattcaaaccacagctggtagctggaataaaactggaacgactgacgtaaccgctggcgacaacctgtatatacagctagagcgcgcaggtaatagttataccgcacgctactcgactgatggcggtgccacctatagcaacattggtggcagctcatttacagacacccttccagacacacttaaagtgggtttcttcgctacgcctaacaacaccggtgagcaaactttcgtttacgaagatatacaaatcactcagtaa

SEQ ID NO: 117 - protein, 391 aa, Microbulbifer degradans
MGMGTKINFLLLGFILSACSLSGCADKIKRNTPLTETALPSKKILYVQTEVCDPPSQLTGSCYNSLQRAIDVAHTVPSATHVTIEMAAGHYHERIVLSRGNIDIVGAGKNKTYVQYNLNAEQGKAYHRDGWGTPGSATFTINASEVNVSDLTIENTFDFLRNDSKDKTDPSKVRASQGVALLLDEHSDKVALYRVGLYGYQDTLFANGKRAFIYQSDIAGNVDFIFGAGQVVIENSRVISRPRGKAIASNEIAGYITAPSTNITDAFGLVFINSRLEREQGVADASVTLGRPWHPTTNFSDGRYADPNAIGHALFFNCFMDAHIHPARWSSMKGTAKDGSKTLVFTPEQSRFFEVQSFGPSGNDEVTTSYHSLSADSLREQALGDWNVSIN

SEQ ID NO: 118 - DNA, 1176 bp, Microbulbifer degradans
gtgggtatgggtacaaaaattaattttttgctattaggttttattttgtctgcatgttcattaagtggctgcgccgacaaaataaagcgcaatacgcctttaaccgaaacggcattgccgagtaaaaaaatactctatgtacaaaccgaagtatgtgacccgccttcgcaattaacgggtagttgctacaacagcttgcagcgagctattgacgtggcgcacacagtgccgtctgctacccatgtaaccattgaaatggctgcggggcattaccacgaacgcattgtgcttagccgtggcaatatcgatattgttggtgcaggtaaaaataaaacctatgttcaatacaacctgaatgccgagcagggtaaagcttatcaccgcgacggttggggtactcctggctcagctacatttaccattaatgccagtgaagtaaatgttagcgatttaactatcgaaaatactttcgactttttaagaaatgattcaaaagataaaaccgacccttcaaaagtgagggcatcgcaaggcgttgcattattattggatgaacacagcgataaggttgcgctgtatcgagtaggcctatacggataccaagacaccctatttgcaaatggaaagcgtgcatttatctaccaatcagatattgcaggcaatgttgattttatttttggcgctggccaagtggttatagaaaatagtcgtgttatttctaggccgcgcggcaaagccattgcttccaatgaaattgccggctatatcacagcgccatccaccaatattacggacgcctttggtctggtttttattaatagtcgattagaacgtgagcaaggcgtggcagatgcgtcggtcaccttgggtcgcccttggcaccctacaaccaatttcagcgatggccgatatgccgacccaaacgcgattggccatgcgctattttttaactgctttatggatgcgcatattcaccccgcgagatggtctagcatgaaaggcaccgctaaagacggcagtaaaacgctagtgtttacgcccgagcaatcgcgtttttttgaagttcagtcctttggccccagcggcaacgatgaagtaaccacctcgtatcattcgttaagcgccgactcattacgcgaacaagcgctcggcgattggaatgtatcaattaactaa

SEQ ID NO: 119 - protein, 914 aa, Microbulbifer degradans
MSALTRPKFGAHTKLFHAIKHALTPVIFLGAAAFPLAAHSQYNMENLDRGLVAIDRKDGSVLVSWRWLGQEPDNTSFNVYRNGTLLTSSPLTNKTNFVDTSGNPNANYAVEAIVNGASQSLATTHVWSDIYRTIPLQRPPGGTTPDGVAYTYSPNDISAADLDGDGGYELIVKWDPSNAKDNSQSGYTGNVYLDAYEISGEFMWRIDLGRNIRAGAHYTQFLAFDFDSDGKAEVAVKTADATKDSQGVVIGDSNADYRNSAGYVLSGPEYLTMFEGQTGRALNTVNYVPARGSVSSWGDNYGNRVDRFLGGVAYLDGQNPSLIMSRGYYTRTVVAAWDWRNGQLSQRWVFDSNTSGNSSYAGQGAHSLTIGDVDADGKQEIVFGAMTIDDNGTGLNNTRLGHGDALHLSDMDPSNPGLEVFMVHECPSCYGEHGIEMHDAATGQILWSHPGDYIDIGRGVAMDIDPRYAGYEAWASRGGLYSAKGETISSTRPSQINFAAWWDGDLLREILDNNYINKWNYTASSTTRLLSAGNYGAASNNGTKATPGLSADILGDWREEVVWRNSNNQELMVFTTPHESEYRLRTLMHDPQYRTAIAWQNVGYNQPPHPSYFLGAGMTTPNQPHITIVGEGTVQPPAPTGDAIQENATGFCGYEGTIDSNHSGYTGAGFTNTTNATGAGINWNLHASTAGTYRLSMRYANGSTARGAVLNVETTGNSYPMAFAPTSTWTNWQEEYVDAHLNAGYNSIRLEANQAAGLPNLDAIYLADGLTAAACGQTSSSSSSSSSSSSSSSSSSSSSSSSSSSSSSSSSGGTTAGLACANGSTDTWGTGFVLNGFQVENEGQQATNNWQVTLQFDQPVNITNAWGVNVETTGTTVVATSVGYNSHLNPGQSASFGMQGTSATAVSNPLCSAQ

SEQ ID NO: 120 - protein, 82 aa, Microbulbifer degradans
MACWPSFSTWKPFNTNPVPHVSVLPLAQARPAVVPPDELLLELLLELLLELEELLEELEELLEDELLLDVWPHAAAVRPSAR

SEQ ID NO: 121 - DNA, 2745 bp, Microbulbifer degradans
atgtcggcactcactcgtcccaaatttggtgcacacaccaaactgttccacgctataaagcatgcgttaacccccgttatatttttaggtgctgctgctttcccacttgccgctcacagccaatacaacatggaaaacctcgaccgcgggttggtggccatagatcgcaaagacggcagcgtattagtaagctggcgctggttggggcaagagccagataacaccagcttcaacgtatatagaaacggcacactattaaccagctccccccttaccaataaaacaaactttgtagataccagcggcaacccaaacgctaattacgcggtagaagccatagtaaacggcgcgagccaatcactagccaccacacatgtatggagcgatatataccgcactattccgctgcaaagaccaccaggtggcaccacccccgacggagtggcatacacctatagccccaacgatataagcgcagccgatttagacggcgatggcggttacgagctaatcgtaaaatgggacccctccaacgcaaaagacaactcgcaaagtggctacaccggcaatgtgtatctcgacgcttacgaaatatctggcgagtttatgtggcgcatagacctaggccgcaatattcgagcaggcgcccactacacgcaatttttagcattcgattttgatagcgatggcaaagcagaagttgcagttaaaaccgcagacgccaccaaagacagccaaggagtagtaataggagacagcaatgccgattaccgcaacagtgcaggctatgttttatctggccccgaatacctcaccatgtttgaaggccaaaccggtagagcgctaaataccgttaactacgtacccgcgcgcggcagtgtttctagctggggcgacaactacggcaaccgtgttgatagatttttaggtggcgtagcctacttagatggccaaaacccaagtttgattatgtcgcgcgggtactacacccgcaccgtggtagcagcatgggactggcgcaatgggcagcttagccaacgctgggtatttgattccaacaccagtggcaacagcagctatgcaggccaaggcgcgcacagccttaccattggcgatgtagatgcagacggaaaacaagaaattgtatttggcgccatgaccatagatgacaacggcaccggcttgaacaatacccgcctaggtcacggcgatgcactgcacctatccgacatggacccaagcaacccaggcttagaagtgtttatggtgcacgaatgcccctcttgctatggcgagcacggaatagaaatgcacgatgccgccaccggccaaatactatggagccacccaggcgactacatagacataggccgaggtgtagccatggatatagacccacgttatgccggctacgaagcttgggcttcgcgcggtggtttatacagtgcaaaaggcgaaacaatatcgagcacgcgcccgtcgcaaataaactttgccgcttggtgggatggcgacttactgcgcgaaatactcgataacaattacataaacaaatggaactacaccgccagctctaccacgcgcttgctaagcgcaggtaactacggtgcagcatcgaacaacggcaccaaggctacaccagggctttcggccgatattcttggtgactggcgcgaagaagtggtatggcgcaacagcaacaaccaagaacttatggtgtttaccaccccacacgaaagtgaataccgcttaagaaccctaatgcacgacccgcaataccgcacagccatagcttggcaaaacgtgggctacaaccaaccacctcacccctcttactttttgggtgcgggtatgactacccccaaccaaccacacataaccatagttggcgaaggcacagtgcagcctccagcccctacaggcgacgcaatacaagaaaacgccaccggcttttgcggctacgaaggcactatagatagcaaccactctggctatacaggcgcgggctttactaacactaccaacgcaacaggtgcaggcattaactggaacctacatgcgtccaccgccggtacataccgcctaagcatgcgttacgcgaatggcagtacggcacgaggtgctgtgctaaacgtagaaacaaccggtaatagctaccccatggcatttgcaccaacaagcacatggacaaactggcaagaagaatatgtagacgcccacctaaacgccggctacaacagcattcggcttgaagcaaaccaagcggcaggtttgcccaacctcgatgccatctacctagccgatggtcttacggcggcagcgtgcggccaaacatctagcagcagctcgtcctccagtagctcctctagttcttccagcagctcttcaagctctagtagcagttccagtagtagctcgagcagcagctcatccggcggtacaacagcaggcctagcttgcgccaacggcagtacagatacatggggaacggggtttgtgttaaacggcttccaagtagaaaacgaaggccagcaagccaccaataactggcaagtgacacttcaattcgaccagcccgtaaacataaccaacgcatggggtgtaaacgtagaaacaacaggcacaaccgttgtagcaacaagcgtaggctacaacagccacctaaacccggggcaaagtgctagctttggaatgcaaggaacatcggcaacggcggtaagcaacccgctatgcagtgcccagtaa

SEQ ID NO: 122 - protein, 789 aa, Microbulbifer degradans
MRSLAPIKIREKIRETLMFNIRAWQLDLPLALLAFSSTSYAIDNGTYTIQSKHSGKVVEVAAGSVDDAANVAQWPSNGHPTQQWIITQISGDDYSVINVNSGKAMEVYDFGTTDGGNIVQYPYWGGAPQLWTITDQGGYYSLINKHSGKALDLLNWDTTDGANIGQWAWWGGDAQLWALNTVQPSTVTFTLEENQAGFCSVDGSIDSNHTGYTGSGFANTTNANGQGVNWSVNVATAGTYTFTWRYAGTSNRPANLLIDGSTQVSGIALNSTGAWATWANSAEISVWLDTGVHSLRLQATTSAGLPNIDSLSITGQSAAAGNCSGAIEPITFATPSFTNIAVHDPSVIEANHQYYVFGSHLSVAKTPDLKNWSRVADGVTTNNPLFNDVTSELAEALAWAETTTLWAPDVTYVNGRYLMYYNACRGDSPLSAMGIASSNNIEGPYTNDGIFLKSGMWGQTSEDGTVYDATVHPNAVDPVIFSDANNRMWMTYGSYSGGIFIMELNPSTGFPYAGQGYGKHLMGGNHARIEGAYTIYSPETGYYYMYVSYGGLGADGGYNVRVARATSPDGPYYDANGTNMANVKSNPSLPLFDDASIAPHGVKLMGNHVFSGTNNVLGYVSPGHNSAYRDATTGQTFLLFHTRFPGRGEEHEVRVHEVFYNDAGWPVIAPLRYAQKVDANNPNRSASELNAVYASELPGSYQLINHGKDISATIKNSVNITLNSNGSISGELSGSWTYNANTRNTVITVAGVAYRGVVSRQWNQARNRFEVTFSALSADGTAIWGVNSD

SEQ ID NO: 123 - DNA, 2370 bp, Microbulbifer degradans
gtgcgcagtctagcccccataaaaataagagagaaaataagagagacactcatgtttaatatacgcgcttggcaacttgacttgcccttggcgttattggcgttttcgtctacaagttacgctatcgataacggcacttacacaattcaatctaaacacagtggcaaggttgtagaagtggccgcaggcagtgtagatgatgctgcaaatgtggcccaatggcccagtaatggccatcctacccagcagtggataattacccaaattagcggcgatgattactcggtaataaatgtaaatagcggcaaagctatggaggtatacgacttcggcaccacggacggcggcaacatagtgcaatacccctactggggaggcgccccccagttgtggacaattacagatcaaggcggttattacagcttaataaacaaacacagtggtaaagctttagatttgttaaattgggataccacagacggcgccaatataggccagtgggcttggtggggcggcgatgcgcaactgtgggcactgaacacagtgcaacccagcacagtcaccttcacacttgaagaaaaccaagcgggtttttgcagcgtagatggcagcatagatagcaatcatacgggctataccggcagcgggtttgccaatacaaccaatgcaaatggccaaggagttaattggtcggtaaatgtagccacagctggtacctatacgtttacatggcgctatgcgggcactagcaaccgcccagccaacttgctaatagatggcagcacacaggtttcgggcattgctttaaattcaaccggcgcatgggcaacttgggctaatagtgcagaaataagtgtttggcttgacacaggtgtgcactcacttcggctgcaagccacaaccagcgcgggcttacctaatatagattcgcttagcataaccggccaaagcgcagcagcgggcaactgcagcggcgcaattgaacctatcacttttgccacaccaagctttaccaatatagcggtgcacgacccctcggtaatagaagcaaaccatcaatactacgtatttggctcccacctttctgtggctaaaacgcccgacctaaaaaactggtcgcgcgtggcggatggtgtaaccaccaataacccattgtttaacgatgtaaccagcgaacttgcagaagcattagcttgggcagaaaccactaccctgtgggcgccagatgttacctatgtaaatggtcggtatttgatgtattacaacgcctgccgtggcgactcaccactgtcggctatgggtattgcttcttcgaacaacatagaaggcccttacactaacgatggtatattccttaaatctggaatgtggggccaaaccagcgaagatggcactgtgtacgacgcaaccgtgcaccccaatgctgtggaccccgttatttttagcgacgcaaataatcgcatgtggatgacctacggttcgtattcgggtggtatttttattatggagttaaacccatccacggggttcccttacgcggggcaaggttatggtaaacatttaatgggtggcaaccacgcgcgcattgaaggcgcttacaccatctacagcccagaaacgggctactactatatgtatgtaagctacggtggcctaggcgcagatggcggctataacgttcgtgtggcccgagcaactagcccagacggcccctactatgatgccaacggcaccaatatggccaacgtaaaaagcaacccaagcttgccactgttcgacgacgccagcatagcaccccacggtgtaaaacttatgggtaaccacgtgtttagcggcactaacaatgtacttggttacgtatcaccagggcacaactctgcataccgtgacgccactaccggccaaacatttttactattccacacacgcttccctgggcgcggcgaagagcatgaagtgcgagtgcatgaagtgttctacaacgatgcaggctggccggtaatagcaccattgcgctatgcccaaaaagtagatgccaacaacccaaatagaagtgcgagcgagctaaatgcagtgtacgcaagcgaactgccaggtagctatcagctaattaaccacggcaaagacataagcgcgacaattaaaaattccgttaacatcacgctaaacagcaacggcagtatctctggcgagctatctggcagctggacatacaacgccaacacccgcaataccgtaatcaccgttgccggtgtggcctaccgcggcgtggtatctcgccaatggaaccaagcacgcaaccgcttcgaagtcaccttcagcgccctatctgcagacggcacagcaatatggggggtgaacagcgactaa

SEQ ID NO: 124 - protein, 362 aa, Microbulbifer degradans
MSSFIMDKSQLQSGFAFKTSGFNVLIVVTFLALLAALVGCSSAKLAPVASPSLPQPLVAQRADPWVHKHSDGYYYFIATVPAYDRLEMRRATTIAGLRSAPAVVVWQRNTIGGMSANIWAPELHFIDGKWYIYVAAATDHNKPWTIRMHTLSNASANPMQGEWQEEGRFHTPLDTFSLDATTFEHRGKRYLVWAQQNEARTYNSALLIAQMDSPTSITGPIVTLSEPTLPWEIIGHKVNEGAAVIKHGKRIFISYSASATDHNYAMGLLWADENADLLDAASWTKSPEPVFYSNEQLKRFGPGHNCFVKAEDGVTDLMVYHARDYKEIDGEPLRDPNRHTRVRKVYWDEQGMPDFRQHEADL

SEQ ID NO: 125 - DNA, 1089 bp, Microbulbifer degradans
atgagtagcttcataatggataaaagccagctacaaagtggttttgcgtttaaaacaagtggttttaacgtgctgattgttgtcacatttttggcattgcttgcagcgcttgttggctgcagcagcgccaagctcgcacccgtcgcctctcctagtttaccgcagccattagtggcccaacgggcagacccttgggtgcacaagcacagcgatggttattactactttatagcaacggtaccagcatacgaccgcttagaaatgcgtagggccacaaccatagcaggcttacgtagcgcgcccgctgtagtggtatggcagcgcaatactattggaggtatgagcgcgaatatttgggcgcccgagctgcattttattgatggtaaatggtacatctatgtagcggctgccaccgatcacaacaagccgtggacaattcgtatgcacacgctttccaatgcatcggccaaccctatgcaaggtgagtggcaagaagaggggcgctttcatacaccgctagatactttctcgctagatgccacaacctttgagcacaggggtaaacgctatttagtatgggcgcaacagaatgaagcccgtacttataactcggcgttacttatagcgcaaatggatagccctacaagtattactggccccattgttaccttaagtgaaccgacattaccgtgggaaattattggccataaggttaatgagggtgcggcagtaattaaacacggtaagcgtatttttataagttattccgccagtgcgaccgatcataactatgcgatgggtttgttatgggcagacgaaaacgctgatttgctcgacgcagcaagctggaccaagtcacccgagcctgtattttactcaaacgaacaattaaagcgctttggccctggccataattgttttgttaaagctgaagatggtgttaccgatttaatggtgtaccacgcgcgtgattataaagagatagatggtgagccattgcgagacccaaaccgccacacgcgggtgcgcaaagtgtattgggatgaacagggcatgccggattttcgtcaacatgaagcagacctatag

SEQ ID NO: 126 - protein, 314 aa, Microbulbifer degradans
MKKLSPLIEQRADPYIYKHTDGYYYFTASVPAYDGIELRRAKTIQALATAETVMVWRKPSEGDYSELIWAPEIHFNMGAWYVYFAAAPSREIKFDLFQHRMYAISCSDANPLTGEWIFEGKIDSGIDAFCLDATTFTHSNELYYVWAQKELDVRGNSNLMIAKMETPTKLATKPVRLSKPEYDWEIQGFWVNEGPSIVKHGSRIFISYSGSATDERYAMGILWAEQSADLLDPASWTKSVEPVLVSEPSEKVFGPGHNSFTVDEEGNDMLVYHARNYTEIEGDPLWDPNRHTYVKKLRWDETGMPIFGSPAFEE

SEQ ID NO: 127 - DNA, 945 bp, Microbulbifer degradans
gtgaaaaaattatcgcctcttatagagcaacgtgcagacccttatatttataaacacaccgacggctactattattttacggcttcggtgcccgcctatgatggcatagaactgcgtcgcgcaaaaactatacaagcgttagccaccgcagaaaccgttatggtgtggcgcaagccaagcgaaggtgattatagtgagcttatttgggcgccagaaatacactttaatatgggggcttggtatgtatattttgctgcggctccatcacgtgaaattaagttcgatttatttcaacaccgcatgtatgccattagctgtagcgatgccaacccgctaacaggtgaatggatatttgaaggtaaaatagatagcggcatagatgcattctgtttagatgccaccacctttactcacagcaatgagctctactatgtttgggcgcaaaaagaattagatgttcgcggcaactctaatttgatgatcgcaaaaatggaaacgcccaccaagcttgccaccaagcccgtgcgtttatctaaacccgaatacgactgggagattcagggtttttgggttaacgaaggcccatccattgttaagcacggctcacgtatttttatttcttattctggctctgctaccgatgagcgctacgcaatgggtattttgtgggcagaacaaagcgcagacttactagacccagcaagttggaccaagtcggtagagcctgtattagtttctgaaccctctgaaaaagtatttggcccaggccacaatagttttactgtggatgaagagggtaacgatatgttggtgtatcatgctcgcaattataccgaaattgaaggcgacccgctgtgggacccaaatcgtcatacttacgttaaaaaattgcgctgggatgaaacaggcatgcctatttttggcagccctgcgtttgaagagtag

SEQ ID NO: 128 - protein, 350 aa, Microbulbifer degradans
NGYYAVLNKHSGKALDLYGFDTSNGANIAQWAFWGGDPQQWQFTKIANVGAPPVDTSTTNGATNHWSLTGNLVTHDPTMAYENGSWWLYQTGEGIYGKYSANGLAWDGLPSVFPNGLSWWKTYVPGQSNNDVWAPDVRTYNGRVYLYYSISTFGSRVSAIGLASASSLAASDWQDHGLVINTTSSSDWNAIDPDLVVDEHGNPWLTMGSWNSGIKVMRLNPITMKPIGTLYSIAQKGGGIEAPSIVYRRGYYYLFVSIGKCCAGVDSTYQIAYGRSTSITGPYLDKNGNDMMSGGGSILDAGNNVWVGPGGQDIINTDVIVRHAYDATDAGTPKMIISTLNWDANGWPKY

SEQ ID NO: 129 - DNA, 1053 bp, Microbulbifer degradans
aatggctattatgccgtgctaaataaacacagcggcaaagcgttagatttgtatggttttgatacgtctaacggcgcgaatattgcgcaatgggccttttggggcggggacccgcagcagtggcaatttaccaaaatcgccaatgtaggtgcgccgccagtagatacatctaccaccaacggtgcaaccaaccactggtccttaaccggtaatctagtgactcacgaccccacaatggcctacgaaaacggctcatggtggttgtatcaaaccggcgagggaatttacggtaagtattcagccaatggtttggcgtgggatggcttaccttctgtgtttcccaatggtttaagttggtggaagacctatgtacccggccagtcgaacaacgatgtatgggcgcctgatgtacgcacttataatgggcgggtttatttgtactattccatctctacttttggctcgcgtgtatctgccattggtttggcgtcggcatcgagtttggctgcgagtgattggcaggaccacggcttagtaattaataccacctcatctagcgattggaatgcgatcgacccagatttagtggtcgatgagcatggcaacccttggttaacaatgggaagttggaacagcggtattaaagtgatgcgcttgaaccccattaccatgaagccaattggcacactttattctattgcgcaaaagggcggcggtattgaagcgccttctattgtgtatcgccgtgggtattactatttatttgtttctatcggcaaatgctgtgcgggcgtagatagcacctatcaaattgcttacgggcgctctacaagtattaccggcccttatttggataagaacggcaacgatatgatgagtggtggtggcagtattttagatgcgggcaacaacgtgtgggttggccctggtgggcaagatattattaacaccgatgtcattgtgcgccacgcgtacgatgccacagatgcaggcacacctaagatgattattagtaccttgaattgggatgctaatggatggccgaaatactag

SEQ ID NO: 130 - protein, 346 aa, Microbulbifer degradans
MLNKNKRPITFALVVSLLALLALAGCSEAKQVSIHDPVMIKEGDTYYLFSTGPGITMYSSSDMKNWRREGEVFNQAPSWASNAVPYFKGHLWAPDIIEKDGLFYLYYSVSAFGKNTSGIGVTVSPTLNPRAPNYGWQDKGMVLRSVPERDEWNAIDPNIVVDNNGTAWMAFGSFWQSLKMVALDSSWTKIAEPQQWHTIAALPKGSMPTGDAVKDGEIEAPFIFKKNDDYFLFVSWGKCCRKDESTYRLAMGRSKNTTGPFLDKNGKDLAQGGGTLLISGNKNWPGLGHNSAYTFDGKDWLVLHAYESADNGLQKLKILEINWDKDGWPTVDTKELDEFVSIELTQ

SEQ ID NO: 131 - DNA, 1041 bp, Microbulbifer degradans
atgcttaacaaaaacaaacgcccaattacattcgctttagtcgttagcctcttagccctgcttgcccttgcaggctgcagcgaggcaaaacaagtaagcatccacgacccagtaatgattaaagaaggtgacacctactacttgtttagcactggccccggcataacaatgtatagctctagcgatatgaaaaactggcgccgcgaaggcgaagtatttaatcaagcccctagttgggcctccaacgccgtaccctattttaaaggccacctgtgggcacccgacatcattgaaaaagatggtctgttttacctctactattctgtgtctgcttttggaaagaacacatccggcattggcgttaccgtatcgcccacgcttaacccacgcgcgcccaattacggttggcaagataaaggcatggtattgcgcagcgtgcctgagcgcgacgagtggaacgctatcgaccccaatattgtggtagataacaacggcaccgcatggatggcttttggctccttttggcaaagcttaaaaatggtggcactagacagcagctggacaaaaatagctgagcctcaacagtggcataccatagcagccttacccaaaggcagtatgcccacaggcgacgcagtaaaggacggcgaaatagaagctccttttatttttaaaaagaacgacgattactttttgtttgtaagttggggtaaatgctgccgcaaagatgaaagcacctaccgcctagcaatgggccgcagcaaaaatactaccggtccattcttagataaaaacggcaaagacctcgcccaaggtggtggcaccctattaataagtggcaacaaaaactggcccggcttaggccacaacagcgcctacaccttcgacggcaaagattggcttgtgctacacgcctatgaatctgcagataacggtttacaaaaactaaaaatattagaaataaactgggataaagacggctggccaactgtagataccaaagaactggatgagtttgttagtattgaattaactcaataa

SEQ ID NO: 132 - protein, 665 aa, Microbulbifer degradans
MDNIMKMIIKLALAVTLAVWVAGCTNQAGLNAENKNIERQTINSPDKSLKVRLSLDESGKVFYSISRNGEQVMLPSQLGVELNSQAFTDGLTITDVDAGKVNDSYTLLHGKQRDITYNANEKIYSLKNKQGDKLIIAFRVSNDGVAFQYRFPNTAKQLLAVKKEITSFAFEHTTKAWLQPIAVAQTGWANTNPSYEEHYQMNIPVDTVSPSPAGWVFPALFKANKHWLLITEAGMNGDYHASRLHAESPNGEYSLGIPMAAEVFEQDGNKGALLAQSNTAFHSPWRVILVGGLDTIIASTLGTDLADPAIAKMDFVKPGTASWSWALLKDESVNYETSLEFIDYAAEMGWDYTLVDADWDRRIGYERTAQLAAYAQSKNVGLLVWYNSSGDWNTTEYSPKSALLDRDKRRAEFARLQNMGVKGVKIDFFPGDGKSVMAYYNDLAKDAADYNLLVNYHGSSLPRGLHRTYPNIMTMESVHGFEMITFMQPSADKAATHMAILPFTRNAFDPMDFTPTTFSDIPNIERRTSNGFELALPVLFLSGLQHIAETAQGMATNAPDYVKAYMRDIPVLWDESKLIDGMPGEHVVIARKHGERWFVAGINATNEAINLEMNFDFALGKQGTLITDSNINTKGVESFTSHTITATKNNALTVKANGGFVIVFN

SEQ ID NO: 133 - protein, 619 aa, Microbulbifer degradans
MAAGQIISLEVKVKKIEEIMKHTARTIALGATGAALLTGLIACNGTNVNTNGDTQQASIKKAPEGMFANPLFANGADPWLEYYDGNYYLTTTTWTSQLVMRKSPTLDGLSTALPVNVWSDSDLTRCCNFWAFEFHRLNGPNGWRWYLMYTSGQHGTLDHQHLSVLESVGDDPMGPYTYKGEMMPNTWNIDGSYLEHNGQLYLLWSEWVGDEQQNFISKMTTPWSIEGPRALLTRPEAEWEKSGRKVNEGPEILKKDGRTFLIYSASYCDTPDYKLAMKELTGDDPMNSEHWTKYDKPVFERGNGVFAPGHNGFFKSPDGTEDWIVYHGNSKEEHGCGATRSVRAQKFTWNTDGTPNFGEPIPEGQFLPLPSGENGPLVTALQGARIQLRNGESCLLAEGKELKQGSCQAEASLWVMDNTADNHYRFGNVASNLFLTADEGLSQSAWVNTASQRWALNAGEGNFVAFTNKYTGDALMQNNWQILPVGKVAISSIQSGRVLQACDKNSANVNQGGWQGRACQAWQFNPASEGHVQIKTGNQCLTVENKSIVPGTNVIAGECESTSSQWLYQLDKEGRATFTNRESKQRLDLANCGLADGTNFAQAPALDTICQAFQVRYLP

SEQ ID NO: 134 - DNA, 1860 bp, Microbulbifer degradans
gtggccgcaggccaaataatttcactggaggttaaagtgaaaaagatagaagaaataatgaaacacacagcgcgcactatagcgctaggtgcaacaggtgccgccttgctaacggggttaattgcctgtaacggtaccaatgtgaatacaaacggggatacccaacaagcaagcattaaaaaagcgccagaaggcatgtttgccaacccgttgttcgccaatggcgcagacccttggttagagtattacgatggcaattactacctcactaccaccacatggacatcgcaacttgttatgcgtaaatcacccacgttggatggtttgtctactgcgctgccggtgaatgtatggtccgattcagatttaacccgctgctgtaacttttgggcgtttgaattccatcgcttaaacggccctaacggctggcgttggtatttaatgtacacctcgggccagcacggcactttagatcaccaacacttaagcgtattagaaagtgtgggtgacgaccctatggggccatacacctacaaaggtgaaatgatgcccaatacatggaatatagacggcagttatttagagcataatggccaattatatttgttgtggtctgaatgggtaggtgacgagcagcaaaactttatatctaaaatgaccaccccatggagcattgaaggcccgcgagcactgttaactcggccggaagcagagtgggaaaaaagcggtcgcaaagttaacgaaggcccagagattctaaaaaaagatggtcgtacctttttgatttactcggcgagctattgcgatacgccagattataaactggcaatgaaagagctaacgggcgacgacccaatgaactccgagcactggactaaatacgataagcccgtgtttgaaagagggaacggtgtgtttgccccaggccacaatggtttcttcaaatcgcccgatggcacagaagattggattgtgtaccacggaaattcgaaagaagagcacggctgcggtgcaacgcgctctgtgcgcgcacagaaatttacttggaacacagacggcaccccaaattttggtgagccaataccagaaggccaatttttgcccttaccttctggcgaaaacggtcctttagtgactgcactgcaaggtgcacgtattcagttgcgcaatggcgaaagctgtttattagccgaaggtaaagagctgaagcagggcagttgccaagcagaagccagtttatgggtaatggataacacggcagataatcactaccgctttggcaatgtagccagcaatttatttttaacggcagacgaaggccttagtcagagtgcctgggttaatactgcaagccagcgctgggcacttaatgcaggcgaaggtaactttgttgcgtttacaaacaagtacaccggcgatgcgcttatgcaaaataattggcaaatactaccggttggcaaagtggcaattagcagcattcaaagtggccgcgtattacaggcgtgcgataaaaacagcgcgaatgtaaaccaaggcggctggcagggtagggcttgtcaagcatggcaatttaacccagcaagtgaaggccatgtgcaaattaaaacgggcaaccaatgtttaaccgttgagaataaatccatagtgcctggcaccaatgttattgccggcgagtgtgaatcaactagcagccaatggctttatcaattagataaagaaggccgcgcaaccttcacaaaccgcgaaagcaaacagcgtttagatttagcaaactgcggcctagccgacggcaccaacttcgcacaagcccctgcgttagatactatttgccaagcattccaagtgcgttatttaccgtaa

SEQ ID NO: 135 - protein, 534 aa, Microbulbifer degradans
MNPASTLSVKTTNKTTNHLKKVALTVAAIVAPLTSWADVKVSLNPQNTGETISKYIYGQFAEHLGSGIYGGIWVGEDSPIPNKNGFRNDVIKALQELQVPVIRWPGGCFADEYRWRDGIGPREQRPIRVNTHWGGVEEPNTFGTHEFFELVELLNTEAYVAGNLGTGSPQEMAEWLEYIVSNSNSTVVAERKKNGREEPWEVAFWGVGNESWGCGGNLTPEYYTNLYRHFSTFVKATGAKRPKLVASGSYDDDETWTTPLSKLKNNIDGISHHYYTLPTSDWSIKGAATGFDEKEWILTLERTLKIDSYLATQTGILKKNNPEGNIGLYLDEWGTWYDAEPGTNPGFLYQQNTVRDAIVAAVNLNIFHNYADRLHMANIAQMVNVLQAMILTDNEKMLLTPTYHVFKMYIPFQDATHIPLDIKGQRDYSAHKTTVPGFSASAAKTPNGNIVVSLVNLNPNEAEEVSIALQGIKVKTITGELLTSQKMDAHNTFDKPNNVQPRALNQSDYSISKNGKTLTVKLPAKAVVVLQLNK

SEQ ID NO: 136 - DNA, 1605 bp, Microbulbifer degradans
atgaacccagcttcaaccctaagtgtgaaaacaactaataaaacaacaaaccacctcaaaaaagttgcccttaccgtagccgctatagttgccccgctaacaagctgggccgatgtgaaagttagcctaaacccacaaaacacaggcgaaaccataagtaaatatatctacggccaattcgcagagcaccttggcagcggcatatacggcggcatatgggtgggcgaagactccccaatacccaacaaaaacggctttcgtaacgatgtaatcaaagccctgcaagagctacaagtacctgttataagatggcccggtggctgctttgccgacgaatatcgctggcgtgatggcattggcccacgtgagcaacgccctatccgcgtaaatacccactggggcggtgtggaagaacccaatacctttggtactcacgaattcttcgaattagttgagctacttaataccgaagcctatgtggcaggtaacctaggcactggctcaccacaagaaatggccgaatggctggaatatattgtttccaactccaactctactgtagtggcagagcgcaaaaaaaatggccgcgaagagccttgggaagtggccttttggggtgtgggtaatgaatcttggggttgcggtggcaacttaacgcccgagtactacaccaatttatatcgtcatttttccacttttgttaaagccactggcgctaagcgcccgaagttagttgcaagcggctcgtatgatgatgacgaaacttggacaacgccactaagtaagctcaaaaataatatagatggtataagccaccactactacaccttacccaccagcgactggagcataaaaggtgcggctacaggctttgatgaaaaagaatggattcttacccttgagcgcacattgaaaatagacagctaccttgcaactcaaacgggtattcttaaaaagaataaccccgaaggcaatatagggttgtatttagatgaatggggtacgtggtacgatgcagagcccggtacaaaccccggctttttataccaacaaaataccgtgcgcgacgccatagtagcagcagtaaacttaaatatattccacaactatgccgaccgcttacacatggcgaacatcgcccaaatggtaaacgtactacaggcaatgatactgaccgacaacgaaaaaatgttgctcacacccacgtatcacgtttttaagatgtacataccatttcaagatgctacccatataccgttagatataaaaggccagcgcgactacagcgcacataaaactaccgtaccagggttctcggcctcggcagctaaaaccccaaatggcaatattgtagtttcacttgttaaccttaacccaaacgaagcggaagaagtgagcattgcactacaaggcatcaaggtaaaaaccattactggtgaattacttaccagccaaaaaatggatgcgcataacaccttcgacaagccaaacaatgtgcagccacgcgcacttaaccaaagcgactacagcattagcaaaaacggcaaaacccttaccgttaagctacccgctaaagccgtagttgttttacagcttaataaataa

SEQ ID NO: 137 - protein, 397 aa, Microbulbifer degradans
MLLAQLPVKKYFVLLAIFSFMLGCNSAGVQQSAKSIQVAGTHSKPARFFAGADLSYVNEMEDCGATYRVNGVTTDPYQAFADAGANLVRVRLWHNPTWTEYSDFADVKKTIRKAKQNNQTVLLDFHYSDTWADPEKQFVPAAWEHMVDDTPALAQALAQYTTDVLEKLQAENLLPDMVQVGNETNAEVLQLEAHMKHGEIDWQRNAALLNSGLAAVAEFNQNNNTYIERVLHIAQPENALWWFDDAAQAGITDFEIIGLSYYAKWSTYKLDSIGEAIRALRTAFNKDVLVVETSYPWTMQNFDQANNVLDATSLQQGYPATAEGQKKYMMDLAKQIMYAGGIGIAYWEPAWVSTPCKTLWGTGSHWENAVFFDSGNNNEALPALSFYTDIMALFKQD

SEQ ID NO: 138 - DNA, 1194 bp, Microbulbifer degradans
atgttattagctcaattgccagttaaaaaatattttgtcttattagctattttctcgtttatgctggggtgtaatagtgctggcgtacaacaaagtgctaaatcaattcaggttgctggcacgcacagtaaacccgctcgtttttttgctggtgccgacctttcttacgtaaacgaaatggaagattgcggagcaacataccgcgtaaacggtgtaactaccgacccttaccaagcctttgccgatgccggcgcaaatttagtgcgcgtgcgcttatggcacaaccctacttggacagaatattccgactttgccgacgttaaaaaaactatccgcaaagccaaacaaaataatcaaacggtattgttagattttcattattcagatacctgggccgacccagaaaaacaatttgttccagccgcttgggaacatatggtggatgacaccccagcactagcgcaagccttagcgcaatacacaaccgatgtattagaaaagctgcaagcagaaaacctattgccagatatggtgcaagtaggtaacgaaacaaacgcagaagtcttacagctagaagcgcacatgaaacacggcgaaatagattggcagcgcaatgcagcgctactaaacagtgggttagcagccgttgctgaatttaaccaaaacaacaacacctatattgaacgcgtattacatatcgcccagccagaaaatgctttgtggtggtttgacgatgccgcgcaggctggcataaccgattttgaaattataggtcttagctactatgccaaatggtcaacgtataaattagattccatcggcgaagctatacgcgccttgcgaaccgcattcaataaagatgtgttggtggtagaaacctcatacccctggactatgcaaaatttcgatcaagccaataacgtgctcgatgctaccagcttgcagcagggctaccctgcaacggccgaaggccaaaaaaaatacatgatggatttagctaaacaaattatgtacgccggtggaattggtattgcctactgggaaccagcttgggtaagcaccccttgcaaaactctatggggtacaggttctcactgggaaaatgccgtgttttttgactctggcaacaacaacgaagcgctacccgcgcttagtttctacacagacataatggctctttttaagcaagattaa

SEQ ID NO: 139 - protein, 420 aa, Microbulbifer degradans
MLQILKDHGMDSIRLRVWVNPAGGWYSSINDVIEKAQRAKAAGMRIMIDFHYSDSWADPGKQYKPAAWTNYTLDGLMSAVWWHTYDSLVALKNAGITPEWVQVGNETNNGMLWEEGRASANMQNYAWLVNSGYDAVKEVFPNTKAVVHLANCHDNANFRWIFDGLQANGGKWDVIGASIYPTNASGYSWSQANSLCEANLNDMQSRYGSEVLIAEVGAPWDHPEAKAIVSDVIAKAQNAGATGVFYWEPQASNWQGYTLGAWNPNTMRPTEALDAFIDGSSNVTTARLQSRNSNRCIDVNGRSTADGADIIQWSCHSNANQQWTFEDMGNNYVRLRVGHSNKCLDVLGAGTADGDNVVQWACHNNANQQWLKEDMGDGYFRLKSRASGKCVDVNAGGANNGDSIIQWSCHTGWNQQWMVY

SEQ ID NO: 140 - DNA, 1263 bp, Microbulbifer degradans
gtgctgcaaattctaaaagatcacggtatggattccatccgtctgcgcgtgtgggtaaaccccgccggtggatggtatagcagcattaatgacgtaatagaaaaagctcagcgcgccaaagctgcgggcatgcgtattatgatcgattttcactacagcgactcttgggctgacccaggcaagcaatacaagcccgccgcgtggaccaactataccttagacggtttaatgtctgcggtgtggtggcacacctacgattccctcgtggccctaaagaatgcgggtattacccctgaatgggtgcaagtgggcaacgaaacaaacaacggtatgttatgggaagaggggcgcgcatccgccaatatgcaaaactatgcgtggttggtgaatagtggctacgatgccgttaaagaagtgttccctaataccaaggcagtggtgcacttggcaaactgccacgacaacgcaaacttccgctggatatttgacggcttacaagccaatggtggtaagtgggatgtaataggtgcctctatttaccctaccaacgcaagcggttatagctggagccaagccaacagtttgtgcgaggcaaacttaaacgatatgcaatcgcgctatgggtccgaggtgctaattgccgaggttggtgcgccgtgggatcacccagaagcgaaagcaatcgtgagcgatgtaattgctaaggcgcaaaacgccggtgcaacaggggtattttattgggagccgcaggcatcaaactggcagggctacacgctaggtgcatggaacccaaacaccatgcgccccaccgaagcattagacgcgtttattgacggcagctcgaatgtgacaaccgcgcgtttgcaatcgcgcaatagcaaccgctgtatagatgttaatggccgcagtacagcagatggtgccgatatcattcagtggagttgccacagcaacgccaaccagcaatggacttttgaagatatgggcaataactacgtgcgattgcgcgtgggccacagtaataagtgcttagatgtactgggtgcaggcactgccgatggcgataacgtagtgcagtgggcatgccacaataacgccaatcagcaatggctaaaagaagacatgggcgatggctacttccgcttaaaatctcgcgccagcggtaaatgcgtagatgtaaacgcaggcggtgctaacaacggtgattctattattcaatggagttgccacactggttggaaccagcaatggatggtttattag

SEQ ID NO: 141 - protein, 589 aa, Microbulbifer degradans
NDLSYVNEMEDCGAVYKDAGSVVDPYEVIANHGGNLVRVRHWNDPYWQALITQPESVAANWKANYSGLEDVTETIRRSKAAGMEVLLDFHFSDIWADPGRQTTPRAWENDFGDEDAMAAHIYDYVTSVLTGLNDEGLMPELIQIGNESNSGMMTTQNLIIEMNDAGTGLNVSKGGQTNYSDQYVARMYNSAISAVRDISEGMTNAPRIAIHVAGADKAVAFFDKLKSIGVTDIDIAGFSFYYGWEQAPIEDVASMIATLKERHPNLDPLMLETGYLWDEENIDSLGNIIGIADPAYLPVSKQNQLKYLTDLSQAVADAGGIGVVFWEPSWVSTECRTPWGQGSSHEHVAYFDHRDGLNFHIGGQWMEVTKLSETPEAGLATTFRVDMTGQDTSAGVFIRGAFTEDTLQPMLYEGENIYSYTTHIQAAQSGSYHYAIGLKNGTRETVPSECANPEDTLNRLYTVGENGEQLVTAVWASCDVFDPQAAGPTTLTLNVDMTGVDVSGGVYVAGDLNAWTITELTQVGASAIYTISYDLAVGAEGGYYFLNGSDWGDRETIPEECVGYYDADRGFLVEEQSPQVLDLVWSSCQ

SEQ ID NO: 142 - DNA, 1770 bp, Microbulbifer degradans
aacgacctttcctacgtaaacgaaatggaagactgcggcgcagtgtataaagatgcaggcagtgtagtagacccctacgaagtgatcgccaatcacggcggcaaccttgtgcgcgtgcgtcactggaacgacccctactggcaggcgcttattacccagccagaatctgtagcggcaaattggaaagctaattacagtgggcttgaagatgtaacagaaacaattcgacgatcaaaagccgccggtatggaagtgctgctcgactttcatttctcagatatttgggcagaccccggcaggcaaacaacgccgcgcgcatgggaaaatgactttggcgatgaagacgccatggctgcgcatatatacgattacgtaacatcagtactcacagggttaaacgacgaaggtttaatgcccgagcttattcaaattggtaacgaatctaactccggcatgatgacgactcaaaacctcattatagaaatgaatgatgcgggtacggggttaaatgtgagtaaaggcgggcaaacaaattactcagatcaatatgttgcgcgtatgtataactctgcgatttctgctgtgcgcgatattagtgaagggatgaccaacgctccgcgtattgctatccacgtggcaggtgcagataaagccgtcgcattttttgataagttaaaaagcatcggagtaacggatattgatatcgcgggcttctcgttttattacggttgggagcaagcaccaatagaagacgttgcaagcatgattgcaaccttaaaggaacgtcaccctaatttagacccgttaatgcttgaaacaggctacctgtgggatgaagaaaacatcgatagcttaggcaatattattggcattgccgaccccgcatatttacctgtgagcaaacagaaccaacttaaatatcttaccgatttatcgcaagcggttgctgatgctggtggtattggagtggtgttttgggagccatcttgggtatcaaccgaatgtcgcacaccttgggggcagggctcatctcacgagcatgttgcttacttcgatcaccgcgacggcttaaactttcatattggtggccaatggatggaggttaccaagttaagcgaaaccccagaagcggggctagctactacctttagagtggatatgactggccaagacaccagcgcaggggtatttattcgcggggcgtttaccgaagacacattgcagcccatgctatatgaaggcgaaaacatttatagttacaccacgcatatccaagcagcgcaaagcggaagctaccactatgcgattggcttaaaaaatggtacgcgcgaaacggttcctagcgaatgtgcaaacccagaagatacgttaaatcgtttatatacggtgggcgaaaatggggagcagttagttaccgcagtttgggcaagctgtgatgttttcgatccgcaagcggctgggccaacaaccttaacgcttaatgtagatatgactggtgtagatgtaagtggtggtgtgtatgttgcaggcgacttaaatgcttggacaatcaccgagcttacacaagttggcgctagcgcaatttataccattagttacgatttagccgtaggtgcagaaggtggctactacttcttgaatggcagcgattggggcgatagggaaacaataccagaagaatgtgtgggctactatgatgcagaccgcggctttttggtggaagagcaaagcccacaggtattggatttagtgtggagtagttgtcaataa

SEQ ID NO: 143 - protein, 339 aa, Microbulbifer degradans
MERTQTAMSDTPVNPNANTTTKAVYTYLKQQWGSKMLTGQMDLTWKDSIDEYQRVINDTGKAPAIMGYDYMNYGIESSFISGLEQTEEAIVHWQRGGLVTFAWHWRDPNVSGSNIGEFYTADTSFQIPIANGQLDESSQSFINMQADIDMIAAELQKLEDAGAVVLWRPLHEASGGWFWWGRTRTDSVSAAYAQVLLWRHMYTRLTDHHGLDNLLWVWNGQNSAWYPGDEYADIVSHDIYDGAKNYESQLAVYNDTKNTPMQTKMVALSENSNIPDPDAMQADGAWWLWFMVWNDSDTAEGVTHENNFWTGEYYNSNAHKQHVYNHELVITLDELPSFD

SEQ ID NO: 144 - DNA, 1020 bp, Microbulbifer degradans
atggagcgcactcaaacggccatgagcgatacgccggtaaaccctaacgccaataccaccaccaaggctgtttacacttaccttaagcagcaatggggcagcaaaatgctaaccgggcagatggatttgacctggaaggacagcattgatgagtaccagcgcgtaattaacgataccggcaaagcccccgcaattatgggctacgactatatgaattacggtattgagagcagttttattagtggccttgagcaaacagaagaagctattgtccactggcagcgcggcggcttagtgacttttgcttggcactggcgagacccgaacgtaagcggtagtaacattggcgagttttatacggctgatacgagctttcaaatcccaattgccaatggtcaactggatgaaagcagtcagagctttataaatatgcaggccgatatcgatatgatagcggcagagctgcaaaagctagaagatgccggcgctgtggtgctgtggcgccccttgcacgaagcttctggcggttggttctggtggggccgtacgcgtaccgattcggtatctgccgcttatgcacaagtgctgttgtggcgccacatgtacacccgccttactgatcatcacggtttagataatttactttgggtgtggaacgggcaaaacagcgcttggtacccaggcgatgaatatgccgatattgtaagtcacgacatttacgacggcgcgaaaaattacgagtcgcaattagccgtatataacgatacgaaaaacacccccatgcaaaccaaaatggtggcgctaagcgagaacagtaatattcccgacccagatgccatgcaggccgatggcgcttggtggttgtggtttatggtgtggaacgactcggataccgcggaaggcgtaacccacgaaaacaacttttggacaggtgaatattacaactctaacgcccataagcagcatgtttacaatcatgagctggttattacgctggatgagttacctagctttgactag

SEQ ID NO: 145 - protein, 561 aa, Microbulbifer degradans
MFNKISTPALSGWSKAARYLCHTATGALMLAASTVNAGFSVSGTQLLDDNGQAFIMRGVNHPHAWYANQTSSFADIASVGANTVRVVLSDGQQWTRNSASDVANVISLCKANKLVCVLEVHDVTGSGEASAAGTLANAAQYWVDIANVLKGQEDYVIINIANEPFGNNVPASNWINQHKAAIQTLRAAGLTHTLMIDAANWGQDWQQVMLNNASEVAQADSLSNTMFSVHMYQVYNNLSTVENYVSTFLSSHNLPLIVGEFGADHQGEEVDEDAILSVAEQYGIGYLGWSWSGNGSCCGTLDITNNFNVNSLTSWGNRLINGTNGIKATSVIASVYGGSSSSSSSSSSSSTSSSSSSSSTSSSSSSSGSSGGAQQCNWYGSVYPLCNNQASGWGWENQQSCIGRTTCESQSGNGGVIGGSSSSSSSSSSSSSSSSSSSSSSSSSSSSSSSSSSSSSSSSSSGGSGATCEHIITNSWNSGFQGAVRITNNGSSAINGWQVSWSYSDGTTIGSVWNANQSGSNPYTASNLGWNATVNPGQSVEFGFTANGGGAASAVTGSVCN

SEQ ID NO: 146 - protein, 61 aa, Microbulbifer degradans
MCSQVAPLPPDELLEEEELEDDELLLDELELLLDELLEELLDELLEELLDEDPPITPPLPD

SEQ ID NO: 147 - DNA, 1686 bp, Microbulbifer degradans
atgtttaacaagatatctacacccgcgttaagcggttggagcaaggctgcgcgctatttatgccatacggctactggcgcattaatgttggctgcaagtacggtaaatgcggggtttagcgtttcgggtacgcagctgttagatgataacggccaagcgtttattatgcgcggtgttaatcatccgcatgcgtggtacgccaatcaaaccagctcgtttgctgatatagcttcagtaggtgctaatacggttcgagtggtactaagcgatggccagcaatggacgcgcaacagcgcatctgatgtggcgaatgttatctcgctatgtaaagcaaacaagttagtgtgtgttcttgaggtacacgatgtaaccggttcaggcgaggccagtgcggcgggtaccttggcaaatgcggcccagtattgggtagatattgccaacgtgcttaaggggcaagaagattacgtaataatcaatattgccaacgaaccgttcggcaacaatgtgcctgccagtaattggattaaccagcacaaagcggctattcaaacgctgcgagcggccggtttaacccacacgctaatgatagatgcggcaaactgggggcaagattggcaacaagtaatgctaaacaatgcttcagaggtggcacaggccgatagcctaagtaacaccatgtttagcgtgcatatgtatcaggtttacaacaacttaagcaccgtagaaaactatgtgtctacgtttttaagtagccataacttgccgttaatagtgggggagtttggtgcagatcaccaaggtgaagaggttgatgaagatgcaattttatctgtggcagagcagtatggcattggctacttaggctggagttggtcgggcaatggcagttgttgcggcaccttagatataaccaacaactttaacgttaacagtttaaccagttggggtaaccgcctaataaacggtaccaatggtattaaagcaacctcggtaattgcatctgtatacggtggctcgtcgagcagttctagttcatctagtagctcttcaactagctctagcagttccagttcttctaccagttcatccagcagttcgtccggttctagtggtggtgcgcaacagtgtaattggtacggctcggtttacccattgtgtaataatcaagccagtggttggggctgggaaaatcagcaaagctgtattggccgtactacctgcgaaagtcagtctggtaatggcggagttattggcgggtcttcgtcgagcagttcttctagtagttcatcaagcagttcttctagcagctcatccagtagcagttctagctcatctagcagcagctcgtcgtcctcaagttcttcttcttctagtagttcatcgggcggcagtggtgcaacttgcgaacacataattacaaatagttggaacagcggttttcaaggggcggtgcgcattaccaataatggcagcagtgccattaacggctggcaagtaagttggagctacagtgatggcacaaccattggcagtgtatggaatgccaatcaaagcggtagcaacccttacacagccagcaatttagggtggaacgccacggttaaccctgggcagtcggtagagtttggttttactgccaacggcggcggtgctgcatcagcagtgacggggtcggtttgtaactaa

SEQ ID NO: 148 - protein, 514 aa, Microbulbifer degradans
MNNEEVNMRIFSIALALCAVLCAGQSLAGLSIQGTRLVDGNGSTVVLRGVNHPHAWYAGETAAAIPKIAATGANSVRVVMAMGTKWSRTSAAEIQTIIDLCKQNNMIAVLEFHDGTGWGEESGTAHISDIADYWVSSDVMAVVKGEEDYVIINIANEPFGNGVSASTYTNDTIAAIQKLRNAGYTHTLMVDAANWGQDWQNLMRDNAQTIFNGDSLNNTMFSVHMYQVYNTSAKVQSYMQAFSDKGLALVVGEFAADHFSEDVAEAAIMQYAEQFGFGYMGWSWTGNSSDLASLDIVKSFSDNTYTTWGNRLINGSNGIATTSRIASVYTGTSSGGSSSSSSSSNSSSSGGTSACSTGGSCDWSGTSFPLCENGNTNDWGYENGQSCVGVGLCDSNPDATTHCGTSSGGGSTSCGTTSDGHPVCCDAASDPDGDGWGWENEASCVVESGSSSSSSSSSSTSSSSSSSSSSSSSGGSSATCNWYGTQYPMCTSTSSGWGWENNQSCISPSTCSGQ

SEQ ID NO: 149 - protein, 52 aa, Microbulbifer degradans
MEHADVPPLLLELDDDEELELPPLDVPVYTLAIREVVAIPLLPFIKRLPQVV

SEQ ID NO: 150 - DNA, 1545 bp, Microbulbifer degradans
atgaataacgaggaagtcaacatgagaatattttctatagcgcttgcgctatgcgccgtgctttgcgcgggtcaatctttagctgggttatctattcagggtacgcgacttgtggatggcaatggcagcacggttgtgctgcgcggcgtgaaccatccccatgcgtggtatgccggtgaaacggcggcggctatccctaaaattgctgcaacaggtgctaactcggtacgggtagtgatggctatgggcactaagtggagccgcaccagtgccgcagagattcaaaccattattgacctgtgcaaacaaaacaacatgattgctgtactggaatttcacgatggcactggctggggggaagagagcggtactgcgcatatatctgatattgccgattactgggtgagcagtgatgtaatggcggtagttaagggtgaggaagactacgtaattataaatattgccaacgaaccctttggcaacggtgtatcggcaagcacctacaccaacgacacgattgcggctattcaaaaactgcgcaacgccggttatacccacacccttatggttgatgcggcaaattgggggcaagattggcagaacctaatgcgtgataacgcacaaaccatttttaatggcgactcacttaacaacactatgtttagcgtgcatatgtatcaggtgtataacacctcggcaaaagtgcaaagctacatgcaagcctttagcgacaaaggtttagcgttagttgtaggcgaattcgcagcagatcattttagtgaagatgttgcagaagcagccattatgcaatacgccgagcaattcggttttggttacatgggttggagttggacgggtaatagctcggatttagcatcgctagacatagtaaaaagctttagcgataacacctatacaacctggggcaaccgcttaataaacggcagcaacggtattgcgaccacttcgcgtatagccagtgtgtacacaggaacgtctagcggcggcagctctagttcttcgtcatcgtctaattcaagtagcagtggcggtacatcagcgtgttccactggcggaagttgtgattggagtggtacaagctttccattgtgtgaaaacggtaatactaacgactggggttacgagaatggccaaagttgtgtaggtgtaggtttatgcgattctaaccccgatgctaccactcactgcggtacttcttctggcggcggttctacaagttgcggcactaccagcgacggccaccctgtttgctgtgatgcagcctcagacccagatggcgatggctggggttgggagaacgaagccagttgtgtcgttgaaagcggtagctcttcgagttcatcaagttctagctctacgtctagttcaagttcgtcgagctcttcaagcagctcaagtggcggtagcagcgccacgtgtaattggtatggcactcaatacccaatgtgtacttctaccagtagcggctgggggtgggagaataaccaaagttgtatttcgccttctacgtgtagtgggcaatga

SEQ ID NO: 151 - protein, 457 aa, Microbulbifer degradans
MVNYLKRAALCMLALVAVACAKSQPETKVEELPATKTAANAGVAATEFVQVNGGRFTLRGQDYAYIGTNMWFAAYIGSTNPEYGDRERLIKELDLLKSLGVTNLRILGASEKSPLRDSMKPAISERGEINQHDILEGLDFALAEMAKRDMKAVIFLNNFWEWSGGMATYLSWVNGGEIVDMADPTKPWPAFALFSAGFYSNEEAKQLFNNYLTKVVSRRNTITGELYANDPTIMSWQLANEPRPGNGDVSKSNLPAYYDWISKTTQLIKSIAPKQLVSIGSEGTMGCLELDECVITAHKETGIDYVTFHMWLKNWGWFDVQNAEQTYDSAVATADKYIDHHIKLANELNMPVVLEEFGMERDGGEFSPESAVTYRDKFYAYVFDRQIKSIRSGGPFVGSNFWAWGGYGKAMHDDAVWRKGDKTFVGDPPQEPQGLNAVFASDTSTLEVLKQAADAIR

SEQ ID NO: 152 - DNA, 1374 bp, Microbulbifer degradans
atggtgaactacttaaagcgcgctgccctgtgcatgcttgcgctcgttgctgtggcttgcgccaaatcgcagccagaaacaaaagttgaagagctgcctgccaccaaaactgcggcaaatgccggtgtggcagcgacagagtttgtgcaagtaaatggtggccgctttacattgcgcgggcaggactacgcctacataggcactaatatgtggtttgccgcgtatattggttctaccaaccctgaatacggcgatcgcgagcgcctaattaaagaactcgatttattaaaatccttgggtgtgaccaacctgcgtattttaggagcatccgaaaaatctccattgcgcgattccatgaaaccggcaattagtgagcgcggtgaaattaaccagcacgatattttagagggcttagattttgcgttagctgaaatggctaagcgcgatatgaaagccgtgatatttctgaataacttttgggaatggtccggcggtatggcgacttacctaagctgggttaacggtggcgaaattgttgatatggcagaccccaccaaaccatggccagcttttgcacttttttcagcggggttttactctaatgaagaggcgaaacaactattcaataattaccttacaaaagttgtaagccgccgcaataccattaccggcgagttgtacgctaacgaccccactattatgtcttggcagctcgctaacgagccgcgcccaggtaacggcgatgtgagcaagtctaacttacccgcctattacgattggataagtaaaaccactcagctaattaaaagcattgcccctaagcagttggtgtcgattggtagcgaaggtaccatgggctgcttagagttggatgagtgcgttattaccgcccacaaagaaacaggtatcgactacgttacattccatatgtggcttaaaaactggggctggttcgatgtgcaaaacgcagagcaaacctacgacagcgcagttgctactgcagataaatatatcgatcaccacattaaactggctaacgagttaaatatgccggtggtgctggaagagtttggtatggagcgcgacggaggtgaattctccccagaaagcgcggtaacctatcgcgataaattctatgcctatgtgttcgatcgccaaattaaaagtattcgctctggcgggccgtttgtagggtccaacttttgggcgtggggcggttatggcaaagccatgcacgatgatgctgtatggcgcaaaggcgataaaacctttgttggtgacccgccgcaggagccgcaaggtttaaatgcggtatttgcttccgatacttcaacgctggaagtgttgaagcaagcggcggacgctattcggtaa

SEQ ID NO: 153 - protein, 850 aa, Microbulbifer degradans
MNTKIKLLSFLASAMLLQACGGDMLGTSDSEDYKLIPEEVTEDPTKARPSENAPVLKTSGTTIQLPDGTPVLLRGINLQFGDNPIEQIDGIQAIRETGSNVVRIQLLADTSTANLEAVLNKVVEHNLIAVLSLYDEALHCKEDDEAFTDAVKQVWLTDFLPIIAQDRYQANIMINIASGWGPEAIFDGYSVGYKTYTDNYKAAIRQFRKAGFNVPLVIDAPGCGADFNAFLSNRGKELMAADDKDNLVLSVHGYGSQWNTATKVTDAISQLAAQNIPVLMSEFGGSGVGEKPVKHMAILDKGAGDYAAEIILPWASATDKVAMNVPFSAPINLTNTDVSFDVKLDEAYVTDGQMGVVMYLRDVNGEYANLAWHSASEFPAGEWATKSYAIQNNASFGWASEAFDITAVAKVGVELVANGKLAEVAGSVVIDNLRVAEGSGAVELYSQSFDDDIAGWGVPWTGTVAAHADGALSLTHDNGEIIAQLDGLGGVVDFAQPVVISGRFFVPADYAGSWMYAKFFNNGEAWTEVGITGLTPGEWTEISVETEFPAAATSVGIQIGNIGIADGATITDSTEPFLLDDFAISGVAANDSFELGTQYMASFDESEDGWAYLSWGASATVEAIDGALNFYPNANDAVRIVLYKTDLSAIDDLDLQDPFTIKTRVLIPDSYTGQAFEYQLFLQDANWQNHFAAKIWNQDELIPGEWMDLVVEVEFPAEFDRAGIPQYLGFDLSSEVALPQDPILIDEIVFEGMVPVEKEVVIIDQVDFFYTNHFTDFAIDYIEGEILEDDILELAYIHQRSEPFSWIAWSWYGNDIENSDWDMTTIVGDATALTERGEDIVNGKGGIAGN

SEQ ID NO: 154 - DNA, 2553 bp, Microbulbifer degradans
atgaacacaaaaataaaattactttcatttcttgcgagtgcaatgctgttgcaggcatgtggtggtgacatgctgggcacctctgacagcgaagactataaattgattccagaagaagtaacggaagatccaactaaagctaggccgtctgaaaatgcccccgtgttaaaaacgagtggtactactatacagctaccagatggtacaccagtgctgctgcgaggtattaaccttcaatttggcgacaatcctattgagcaaatagatggcatacaggctattcgcgaaacaggttcaaacgttgtgcgaattcaattgttagcagatacatctacagcaaatttagaggcggtgctaaataaagttgttgagcataatttaatagctgtacttagtctctacgacgaagctttacattgtaaagaagatgatgaggcatttacggatgcagttaagcaagtatggcttaccgattttcttccaattattgctcaagatcgttatcaagcaaatattatgattaacatcgcaagtggctgggggcctgaagccatttttgatgggtatagtgtaggttacaaaacgtataccgataactataaagcagctattcgtcagttccgaaaggctgggtttaatgtgcctttggtaattgatgcccctggatgtggtgctgactttaacgcttttttaagtaatcgcggtaaagagcttatggctgcggatgataaagacaatcttgtgttgtccgtgcacggttatggttcgcagtggaacacggctactaaagttacggatgcaattagccagcttgctgcgcaaaatatccctgtgctaatgagcgagtttggtggctctggtgtcggtgaaaagcctgttaaacatatggcgatccttgataaaggtgcaggagattacgccgcagaaattattctgccatgggcgagcgctacagataaagtggctatgaatgtgccattctcagcacctatcaatctgacaaacactgatgtgagctttgacgttaagctggatgaagcatatgtcacggatggtcaaatgggggttgtaatgtacctccgagatgtaaatggagaatatgcaaacttagcttggcactctgcctctgaatttccggctggtgaatgggctactaaatcttatgcgattcagaataatgcatctttcggctgggcaagtgaggcgtttgatattactgccgtcgctaaagttggtgttgagttggttgcaaatggcaagctcgccgaggttgctggcagcgttgttatcgacaaccttcgagtggctgaaggtagtggtgcagtcgagttatacagtcaaagctttgatgatgatattgcaggttggggcgtgccttggactggcacagttgctgcgcacgctgacggtgctttatcgctaacccatgacaatggagaaattattgcccagctggacgggcttggtggtgtagttgattttgcccagccggttgttattagtggcaggttttttgtgcctgcggattatgctggttcatggatgtacgctaaatttttcaataacggcgaggcatggacagaggttggaattactgggcttactcctggagagtggacagaaatttccgtcgaaaccgaatttcctgcagctgctaccagtgtaggcattcagattggcaacataggtattgctgatggggcaaccattacagattccacagagccttttttgctggacgactttgctataagtggcgtagcagctaatgactcgttcgaacttggtacgcagtatatggcgtcgttcgatgaatctgaagatggctgggcttacttgagttggggggcgtctgctactgtagaggccattgatggcgctttgaatttctatccaaatgccaatgatgcggtgagaatagtactttataaaaccgacttaagtgctatagacgacttggatttgcaggacccgttcaccattaaaacgcgagtattgattccagatagctacacaggacaggcgttcgagtatcagctgtttctacaagatgctaactggcaaaatcattttgcagcgaaaatttggaaccaagatgagcttatccctggtgagtggatggacttggtggttgaggttgagtttcctgctgaattcgatcgggctggaattcctcaatacctcggttttgacctgtcctccgaagttgctttaccacaagacccaatactaattgatgaaatagtttttgaaggcatggttccagtagaaaaagaagttgtgatcattgatcaggtagatttcttctacactaaccactttacagattttgctatcgactatattgagggtgaaatattagaggacgacattctggagcttgcttatattcatcagcgcagcgagccattctcttggatagcttggtcttggtacggaaatgatatcgaaaattctgactgggatatgaccaccatagttggcgacgcaacagccttgactgaacgtggtgaagatatcgtaaatggtaaaggtgggattgcaggtaactag

SEQ ID NO: 155 - protein, 408 aa, Microbulbifer degradans
MQKITRLAALVVAGLCLLGTQAQAKKFEHLAQTPPMGWNSWNNFGCDVDEKLIKETADYMVSSGMKDAGYEYVNIDDCWHGERDANGFIQADPERFPSGIKALADYVHSKGLKFGIYSDAGWTTCGGKPGSRGYEFQDAQMYAKWGVDYLKYDWCATDGLKAEGAYQTMREAIHKAGRPMVFSICEWGDNQPWEWAKPIGHLWRTTGDIYNCFDCEYDHGTWSSWGVLQILDMQDDLRQYAGPGHWNDPDMMEVGNGMTEAEDRSHFSMWAMLAAPLIAGNDIRNMSEATRKILTNKAVIAVDQDELGVQGFKYSSKNGVEVWFKPLANDEWAMAVLNRNKGEVKFEFKWRNEVVKDELTHRTITFNEQKFDWQDLWNKSNKGHTKKFLKTKIAGHDTLMFRLTPAKN

SEQ ID NO: 156 - DNA, 1227 bp, Microbulbifer degradans
atgcaaaaaattacacgtttagcggcgttagtcgtcgctggcttgtgcctgctaggtacgcaggcgcaggcgaaaaagtttgaacacttagcccaaaccccgcctatggggtggaatagctggaacaattttggctgtgatgtagatgaaaagctcatcaaggaaacggctgattatatggtttcttccggcatgaaagacgcgggatatgagtatgtaaacatagacgattgctggcatggtgagcgcgatgctaatggttttattcaggcagaccccgagcggtttccttccggtattaaagcgcttgccgactatgttcattcgaaggggctgaagtttggtatttattctgacgcgggttggaccacctgcggcggtaaaccgggcagtcgtgggtacgagtttcaagatgcacaaatgtatgcgaaatggggcgtggattatcttaaatacgattggtgcgctacagatggcttaaaggccgaaggcgcatatcaaacaatgcgtgaagccattcataaagccggtagaccaatggtatttagcatttgcgagtggggcgacaaccagccttgggagtgggccaaacctattgggcatctatggcgtaccacgggtgatatctacaactgtttcgattgcgaatatgaccacggtacttggtcttcctggggtgtattgcaaattttggatatgcaagacgacctaaggcagtacgctgggccaggccattggaacgaccccgatatgatggaggtgggcaatggcatgactgaagctgaagaccgttcgcatttttcaatgtgggctatgttggcagcgccccttattgctggtaacgatatacgcaatatgtcggaagctaccagaaaaattctcaccaataaggccgtgatagcagtcgatcaggacgagctaggcgtacagggctttaaatattccagtaaaaatggcgtagaggtttggtttaaaccgttggcgaatgatgagtgggcaatggctgtactcaaccgaaataaaggtgaagttaaattcgagtttaagtggcgtaatgaagtggttaaagatgagctgacgcatcgcactattacgttcaacgagcaaaaatttgactggcaagatttgtggaataaatccaacaagggccataccaaaaaattcctaaaaacaaaaatagctgggcacgatacgctgatgtttaggctaacgccggctaaaaactag

SEQ ID NO: 157 - protein, 1733 aa, Microbulbifer degradans
MSCTPCIRSKASSLNFDNKLIKSEFIMSNQKRLSAGLIAKLALASGLTLVATAATHADVTNPVIGNLIFEENFNTLNSDRWNVIEGDGCQYGPNLCGWGNQELQYYQDSNVTIEDVPGEPGNKAVVFEARNETVNGSAFTSGKIDSEDGIAIKYGMIEFRLRVPNMGVGYWPAVWMLGTSTESWPSKGEIDMMEMGHRAQGMADAGHPGTNLNNYTAANAIFYAEAACVPENPTCAAMTAWQTDNAYVSQTSMGERFVIYRTYWTDTQLRFTVIDNGVEYDMYDDPITIGEEATELQQPFYLLANLAVGGNFTDASTPAEVTAQLPGKMYLDYIRVYQLDGMGEIFEGSIAQKEYGTFGVFTDDTPTSNKLVAGDTSQIYIWNQNSLSEGTLAPAEGDNVIAWNYTAPEWFGAGIQAVHARDMSNFENGEFKFKIKIPANVSFKVGFADTYTNENWLTFPANQTTYGLVRNGEWAEATIPVADLRGSLIALQSMAGMFYIASVDGQIPTSNFEFAIDDVRWEGGGAGPVDSDGDGVADELDQCPNTPAGTAVDSVGCQIGLPQPVAVTVEAEDYEAYYDTTSGNSGNAYRSDDVDIEAASEGGFNVGWTDAGEWMDYTLNLAAGTYDVTARVASNTDTGVYSVSLDGTTIGSNGVATGGWQNWVTQVVGQITVNGGQQTLRISTDVAGYNINWVHFEPVPDADNDGVPDSQDNCPNTPAGTEVDANGCAIVVDPVPVHIEAEDYAAYHDLSAGNNGGQYRSDDVDIEAASEGGFNVGWTDTGEWLEYSVELIEGVYDLTARVASLSGNGAYSVSISGQAVGGSNAVATGGWQNWETQHVARFVAGTGTYTIRVNADAGGFNLNWLHLEPVNDPDSDNDGVPDSQDNCANTPAGTEVDASGCPVVVQPFGVTQSDSNSAQFYVNGADWAVLHYSVNGGGQVNVSMSLENGKHVYTVPDLAPGDSISYFVTYWDPELGGARDSETVSYSVVAAGSDSDGDGVGDSADQCPNTPAGTAVDSVGCPVTQPPSDSDNDGVTDANDQCPNTPAGTSVDSVGCPVVQPPSDSDNDGVDDSSDQCPNTPAGTSVNAVGCPVTQTNIVPLYNASTNLEGAISFDRGDALVTRISDRGRDRHAKENHFQAYDHYLTFYWEDRTIAIEIVDYVAKGGSSIRMNIVSQMRLDDTEAENRWFYIGNNTLAEYCGNGVMNEVDHTHYWKESSFNCREGRPIQIGDKMEFEISQFLDPALLPRGRSNYYGTTYLYIVGEGLVPWDVTDKVAFQGGNRLQRDSIPVPEHARLGGDTTLHVQMTAEPDGHFQQMATNLGFDNGQPFVLGRRVHHTSYVDGTHDESAENGVFDGMPGKAGPHYVNDRCSDCHERNGRAPVVGIGEPLDRWVFKVGDANGNPHPDMGRVLQPEANNGAASEGTPTIAFFSEENGLRKPNYAFSGITPDTFSARIAPQLNGIGLLEAIPESAILAQEDVNDANGDGISGKAQRSIDPVTGETRLGRFGYKAATSSVKHQVAAAFNTDIGVRTSVMPNPDCGSNQNDCGPSGAELADEHLDNLVKYVSLLGVRPQRDYNDAQVLQGKQVFNDAGCVSCHTDTYQTSQYHPLAELRSQTIHPYTDLLLHDMGPGLADNLGEGDATGAEWRTAPLWGLGLSACVTGGVEGGRGWDDFGLDGYETCTPHHSYLHDGRARTIEEAILWHGGEGENSKQAYQNLSNSERDALLAFLNSL

SEQ ID NO: 158 - DNA, 5202 bp, Microbulbifer degradans
gtgagttgtacaccctgtattagatcaaaagcttcatcacttaacttcgataataaacttataaaaagtgagttcatcatgagtaaccaaaagcgattgtccgctgggttaattgcaaagttagcgttggcttcaggccttacgctagtcgccactgcggccacccacgccgacgttaccaatcctgttattggtaatttaatctttgaagagaatttcaataccctcaacagcgatcgttggaatgtgattgagggtgatggctgccaatacggcccaaacctttgcggttggggcaaccaagaattgcagtattaccaagatagcaatgtaaccatcgaagatgtgcccggagaaccgggcaacaaagcggttgtttttgaagcgcgcaacgaaactgtaaatggcagtgcgtttacatccggcaaaattgattcggaagacggaatagccattaagtacggcatgattgagttccgtttgcgagtaccaaatatgggcgttggctattggcctgcggtttggatgcttggcacaagcacagaaagctggccgagcaaaggcgaaatagacatgatggaaatgggccatcgtgcccaaggcatggccgatgcgggccacccaggcacaaacctaaacaactacaccgcggccaatgcaattttttatgcagaagcagcctgtgtacccgaaaaccccacctgtgcagccatgaccgcatggcaaacagataacgcctatgtttctcaaacgtctatgggcgagcgatttgttatttaccgcacttattggaccgacacccagttgcgttttaccgtaattgataatggcgttgagtacgatatgtacgatgatccaattactatcggcgaagaggctactgagctgcaacagccgttttatttgttggcaaacttagcagttggcggcaattttaccgatgcgtctacacctgccgaagttaccgcacagctgcccggtaaaatgtatttagactatattcgtgtgtaccaattagacggtatgggcgaaatattcgaaggctcaattgcccaaaaagaatacggcacatttggtgtgtttaccgatgacacgcccaccagcaataagctggtagccggtgatacgtcacaaatttatatttggaatcaaaactccctaagtgaaggaacgcttgcgcccgccgaaggcgacaatgtaatagcctggaactacaccgcgccagagtggttcggtgctggcattcaagctgtgcacgcgcgcgatatgagtaattttgagaatggcgagtttaaattcaaaataaaaatacccgctaacgtctcatttaaagttggttttgcagatacttacaccaacgaaaactggctaactttccctgctaatcaaacaacctacggtttggtgcgcaatggcgaatgggctgaggcgacaattccagtagcggacttgcgcggcagtttaattgcattgcagtctatggctggtatgttttatatcgccagtgttgacggccaaattccaacgtctaattttgaatttgccatcgacgatgtgcgctgggaaggcggtggtgcagggcctgtagacagcgacggcgacggcgtagctgatgaacttgatcagtgccccaacacaccagccggtactgcagtagatagcgttggctgccaaataggtttgccacagcctgtggctgtaacggtagaagcggaagactacgaagcttactacgatacaaccagtggcaactctggcaatgcgtatcgcagcgatgatgtagatatagaagctgcaagcgaaggtggttttaacgtcggttggactgatgctggcgagtggatggattacactttaaacctcgctgcgggcacctacgacgttacagctcgtgttgcttcaaataccgatactggtgtgtacagtgttagtttagatggcaccacaatcggctctaacggagttgcaactggcggttggcaaaactgggttactcaagttgtcggccaaattacggtaaatggcggtcaacaaactctgcgcattagtactgatgtggctggatataacattaactgggtgcattttgagcccgtgccagacgcagataacgatggcgtacctgacagccaagataactgccccaatacaccagcgggtacagaggtggatgctaatggctgtgcgattgtcgtagacccagtacccgtgcacatagaagccgaagattacgcggcctatcacgacctatctgcaggtaacaatggcggtcaataccgctctgatgatgtggatattgaagccgctagcgaaggtggattcaacgtaggttggacagatactggcgagtggttggaatactcggttgaattaattgaaggtgtttatgacctaactgcacgcgtggcatcgttaagcggcaatggcgcttacagcgtttctatttctggtcaagctgtgggtgggtctaatgctgtagcgactggtggttggcaaaattgggaaacccagcacgtagcgcgttttgttgcaggcacgggtacctacactattcgtgtaaatgcagatgccggcggctttaaccttaattggttgcacttagagccagtaaacgaccccgatagcgataacgacggtgtgccagacagccaagacaactgcgccaatacccctgccggcaccgaagtggacgccagcggttgcccggtagttgtacagccatttggtgtgactcagtcagattccaacagcgcgcaattttatgtaaatggcgccgactgggcagtgttgcattacagtgttaatggcggtgggcaagtgaatgtgtccatgagtttggaaaacggtaagcatgtatataccgtgccagacttggccccaggtgactccattagttactttgttacctattgggacccagaactaggcggtgcacgcgacagtgaaacggtaagctacagcgtagttgctgcgggtagcgatagtgatggcgacggcgtaggtgatagtgctgaccaatgcccaaatacacccgccggcacagctgtcgattctgttggttgcccagtaacacagccaccatccgatagtgacaacgatggcgttacggatgctaatgatcagtgcccaaatacacctgcaggtacatcggttgattccgttggctgcccagtggttcagccaccatcagatagcgataacgacggtgtggacgattcaagtgatcaatgtccaaatacccctgcgggtaccagtgtaaatgcagtgggttgccctgtaacgcaaactaatattgtgcctttatataatgccagcacaaacttagaaggcgctatttcttttgatcgcggtgatgcgcttgttacgcgaatttcagatcgcggtcgcgaccgtcacgcaaaagaaaaccacttccaagcttacgatcactaccttactttctattgggaagatcgcactattgctattgaaatagtggattacgttgcgaaaggtggcagcagcattcgcatgaatatcgtaagtcaaatgcgtttggatgacaccgaagcagaaaaccgctggttttatattggtaacaacacgctcgctgaatactgtggcaatggcgtgatgaacgaagtggatcacacgcactactggaaggaatctagctttaactgtcgtgagggtcgtcccattcaaattggcgataaaatggagtttgaaatcagccaatttttagaccccgcgctattacctcgcggtcgctctaattattacggcaccacttacctttacattgtgggtgagggcttagtgccttgggatgttaccgataaagttgctttccaaggcggcaaccgtttgcagcgagattccattcctgtgcccgagcacgcgcgtttaggtggcgatacaactttgcatgtgcaaatgactgccgagccagatggccacttccagcaaatggcaaccaacctgggttttgataatggccagccgtttgtactcggtcgccgtgtgcaccacacatcttacgtagatggtacgcacgatgagagcgcagaaaacggcgtatttgatggtatgccaggtaaagcaggcccgcactatgtgaatgaccgctgctcggattgtcacgagcgcaatggtcgtgcaccggttgtgggtattggtgaaccgttagaccgttgggtgtttaaagtgggcgacgcaaatggtaacccgcatccagatatggggcgcgtattgcagccagaagcgaacaacggtgccgctagcgagggcacgccaaccatcgcattctttagcgaagaaaacggtttgcgcaaaccaaactatgcatttagcggcataacgccagacactttctctgcgcgtattgccccacagctaaatggcattggtttgctcgaagcgattccagaaagtgcaattttagcgcaagaagatgtgaacgatgcgaacggtgatggtatctccggtaaagcgcagcgctctatcgaccctgtaaccggtgaaacccgcttaggtcgctttggctacaaagcagcaaccagcagtgtaaagcatcaagtggctgcggcgtttaatacggatataggtgtacgtacctctgtaatgcccaacccagattgcggctcgaatcaaaacgattgtggcccaagtggtgcggaactagcagatgagcatttagataaccttgttaagtatgtttctttactgggtgttcgcccacagcgagactacaacgatgcgcaagtactacagggtaagcaagtgtttaacgatgctggctgtgtgagttgtcataccgacacttaccaaacatcgcaatatcacccgcttgcagagttacgcagccaaactattcacccctacacagatctcttgctgcacgatatgggcccaggtttggccgataacttaggtgaaggcgatgcaacgggtgccgaatggcgtaccgcgccgctttggggcttaggtttgtctgcttgtgttacgggtggtgtagaaggtggtcgcggctgggatgattttggcttagatggctacgaaacctgtactccacatcacagctacttacacgatggtcgcgcacgcaccattgaagaagctattttgtggcacggtggcgaaggtgaaaactcgaagcaagcgtaccaaaacttaagcaatagcgagcgcgatgctctactcgcattcttaaattccctctaa

SEQ ID NO: 159 - protein, 1441 aa, Microbulbifer degradans
MTTRNTFKLSKLLLSLGVLTASSQLVAQDLIWSDEFEGDKIDRSIWSYNVGGSGNGNGELQYYTANATNSRIEDGNLVIEARREEMEGKQFTSARLHTNGRFSFKYGTLEARIKLPKLDDGLWPAFWTLGDNFGVDGWPKSGEIDILEAGYKAAREAGTTNTAVSGAVHWWHESGDWSDWLQADAHAETHVTTPMNEAYHTYRLEWTPSELSISVNDNTYFTMDITDPNMSEFHGAQHLLLNLAVGGWNFVEIEDPALITADFPAQMLVDYVRLYSNEFTEVFDANENLPTGDFGVMTDLTPVFNELNWGDRMHLYIWNNMEVAGIDPYEGTSVLAYDVAPDAWWGMGLLHKDYNMRNYKHGYLHFMMKTTATSDISINMASTSGGEGAVVLANGGEEYGLERDGEWHEVNIPLAKFGAMDFETIKTFFSMSGPGQAEAFQIAVDDIYLKSSIALPRPEFGSFGIYTESPENMSAGNFGFGVEGDLFLWADTLELLPGEVVEGNASLHLKSTGQGWFGMGLTAREGFNLSAFDNADAKLHLSMKTTDQTDFQVGIKSGSVNDIGQVWIKFTPGNDPYGFARDGQWHDLVIPMSDIAQDLDMFDVRQVFQLLGFGEIESLAIDNIYISGGGASTPEIVNPSEPVNRAPMAAIKPSVNGGPATLSVDFDASQSGDVNGDALTYTWDFGDGTTATGVQVSHDFEKEGNYRVSLIVSDGQATDETAAIITVDDNYGLSRSDKRGLGFGHHSVADFEAISQGISWWYNWSIKPDSLIQDVYQNYGVEFVPMAWNGGFDDQAMRDYINAHRDDVKYILAFNEPNFLEQANMTPSQAAAEWPRLEAIADEFGLKIVSVAMNFCGNCVTENGTTYYDPIDYFDDFFEVCPDCRVDALSIHAYMGGVGGIEWYIDLFAKYNLPIWMTEFSAWDDTTTEEEQIFFMTQAVDYMEQHENVERYAWFTGRRNGHPYNGLFDYRQSGVLTELGSAYINMPVHGEDSIHTLPKHIEAEAYAYQSGGRVAPTTDANGFLQMGENAAGSWVEYNVINPATRSYNVAVRVNSETGGTITVLVDGVEKGQIPVPAAADAQAWATVDTDLEITAGEHDVRLVFGASVNLNWLNIGDALSPELEPEPEPEPEPEPEPEPEPEPEPEPEPEPEPEPEPEPEPEPEPEPEPEPEPEPEVDPTAPLACTATASSQEGALAPSFVCDGDAGTRWSSEWNDNETITLDLGDVYEISSINLTWENAYGSKYDILVSDDNVHWTLAYSEQAGDGGIDNLAVTATGQYVRLLGLERGIGYGFSLFSFDVYGALKPVVVVPEGDLALGKPTSASSSEWAEPTAANATDGNTGTRWASAWTDSEWISVDMGEVYPVGRVVLNWEGAYGKGYNIQTSNNGADWTTVYTETAGDGGTDEIILPFASGRYIRVLGTERGTGYGYSLWDFEIYAD

SEQ ID NO: 160 - DNA, 4326 bp, Microbulbifer degradans
atgacaacgcgaaatactttcaagctgagtaagctcctgctttcgctaggtgtacttaccgcttcttcgcaactcgtcgcccaagacctaatttggtccgacgaattcgaaggcgataaaattgaccgcagcatatggtcttacaatgtgggtggtagtggtaacggcaatggtgagttgcagtactacaccgccaatgccaccaattcacgcattgaagacggcaacctcgttattgaggcgcgccgcgaagagatggaaggtaagcagtttacttctgcacgtctccatacaaatggtcgcttttcttttaaatacggtaccttagaggcaagaattaaattgcctaagttagacgatggcctgtggccagcgttttggactttgggtgataactttggtgtagacggctggccaaaatctggtgagatcgatattttagaagccggctacaaggctgcgcgcgaagcgggcaccaccaatactgcggtgtctggtgctgtgcactggtggcacgaaagtggcgattggagtgattggttgcaggccgatgctcatgccgaaacgcatgttacaacgcctatgaacgaggcgtatcacacctatcgtttagagtggactcctagcgagctatctatttctgtaaacgacaatacctatttcaccatggatattaccgacccaaacatgtcggaatttcacggtgctcagcatttgctgcttaacttggctgtaggtggttggaactttgtagaaattgaagacccagcgcttattactgcagatttccctgcacaaatgcttgtggactacgtgcgcttatacagcaacgaattcaccgaagtgtttgacgcaaacgaaaacttaccaaccggtgacttcggcgtaatgaccgatttgacccccgtgttcaatgaattgaactggggtgatcgtatgcacctgtacatttggaacaatatggaagtagcgggcatagacccgtacgaaggcacttctgtattggcttatgatgtggcgccagatgcgtggtggggcatgggtcttttgcataaagactacaacatgcgcaactacaaacacggctacctgcacttcatgatgaagacaaccgctacctccgatatcagcattaacatggccagtacctctggcggtgaaggtgctgttgtattggcaaacggcggtgaagagtacggtttagagcgcgacggcgaatggcatgaggtgaatattcctctggctaaattcggcgcgatggatttcgaaaccatcaaaactttcttcagcatgtctggcccaggccaagcagaagcattccaaattgctgtggacgacatttatctaaaaagcagtattgctttacctcgcccagagtttggcagcttcggtatttacaccgaaagcccagaaaatatgagcgcaggtaactttggttttggtgtagaaggtgatttatttctttgggctgataccttagagctattgccaggcgaagtggttgaaggcaatgcatcactgcatttgaaatcaaccggtcaaggttggttcggtatgggcttaacggctcgcgaaggctttaacctttctgcgtttgataacgccgatgcgaaattacacctctcaatgaaaaccacagatcaaactgatttccaagtgggcattaagagcggcagcgtaaacgacatcggtcaagtgtggattaagtttacccctggtaacgacccatacggtttcgcacgcgacggtcagtggcacgacttagttataccgatgtctgatatcgcacaagatttagatatgttcgatgtgcgtcaagtatttcaattgttaggttttggcgaaatagaaagcctcgcaattgacaatatttatattagcggtggtggtgcatctacaccggaaattgttaacccaagtgaacctgtaaaccgcgcaccgatggctgcaattaagccttctgtaaatggcggccctgcaacattgagtgttgatttcgacgcgagccaatctggcgacgtaaacggcgatgcgcttacctatacctgggactttggtgacggtactactgcaaccggcgtacaagtaagtcacgactttgaaaaagaaggtaactaccgcgttagcttaattgtaagcgacggccaagcgacagacgaaactgcagccattattactgttgacgataactacggtttatcgcgcagcgataagcgcggacttggttttggtcaccactcagttgccgacttcgaagctatttcgcagggtatttcttggtggtacaactggtctattaagccagattcactgattcaagatgtttaccaaaactacggcgtagagtttgtacctatggcgtggaacggtggttttgacgatcaagcaatgcgcgattacatcaatgcgcaccgcgacgacgttaaatacattcttgcgttcaacgagcctaacttcttagagcaagccaacatgacgccttcgcaggcggcagccgagtggccacgtttagaagccatagccgatgagtttggtttgaaaattgtttccgttgctatgaacttctgtggcaactgtgtaacagaaaatggcactacctattacgaccccattgattactttgacgatttcttcgaagtgtgccctgactgccgtgtagatgcgctttctatccatgcttacatgggtggtgttggcggcatcgagtggtatatcgatctgtttgcaaaatacaaccttccaatttggatgaccgagttttctgcatgggacgataccaccacagaagaagagcaaatcttctttatgacccaagcagtagactacatggagcaacacgaaaatgtagaacgctatgcgtggttcactggtcgtcgcaatggtcacccgtacaacggtttgtttgattaccgccagtcgggtgtacttaccgagctaggcagcgcgtacatcaacatgcctgtgcacggtgaagacagcattcacactttaccaaagcatattgaagcagaagcttacgcttaccaaagcggtggacgtgtagcacctactactgatgcaaatggcttcttgcaaatgggcgagaacgctgctggctcttgggttgaatacaacgtaataaacccagcgactcgcagttacaacgtagcggtacgtgtaaacagcgaaaccggcggcaccattaccgtattggtagacggtgttgagaaaggccaaattcctgtacctgcagcagctgatgcgcaagcttgggcaactgtggataccgatttggaaattactgcaggtgagcacgatgtgcgcttggtatttggtgcaagtgttaaccttaactggttaaacattggcgatgcgttaagcccagaactagaaccagaaccagaaccagaaccagaacctgaaccagagcctgaaccagaacctgaaccagagccagaaccagaaccagaaccagaaccagaaccagagcctgagccagagccagagccagagccagagccagagcctgagcctgagccagagccagaagtagacccaactgcaccattagcgtgtaccgctacagcctcatcgcaagaaggcgcgttagcaccaagctttgtgtgtgatggtgatgccggcacccgttggtcatccgagtggaacgataacgaaaccattacgttagacctaggtgatgtttatgaaatatctagcattaacctaacgtgggaaaatgcctacggaagcaagtacgacatattggtttcggacgataacgtacactggacgcttgcctacagcgaacaagctggcgatggcggtatagataacttagcagtaacggctactggccaatacgtgcgcctgcttggtttagagcgcggcattggttacggcttctctctgtttagtttcgatgtttacggtgcactaaaacctgtagtggttgtaccagaaggtgatttggcgttaggtaagcctacgagtgcttcttcatcggaatgggcagagccaaccgccgctaatgcaaccgatggcaacaccggcacgcgttgggccagtgcttggacagacagtgagtggatttctgtagatatgggtgaagtgtatcctgttggtcgagtggtacttaactgggaaggtgcatacggtaaaggctataacattcaaacctcaaacaatggggctgattggactaccgtttacaccgaaaccgcaggcgatggcggtacagatgaaattattctgccattcgcgtctggccgctatattcgtgtactaggtaccgagcgtggcacaggttacggttactcactgtgggattttgaaatctacgcagattaa

SEQ ID NO: 161 - protein, 1207 aa, Microbulbifer degradans
MQPSAYGLYCAACYSQKSKCEFIMIKNNLIKYAVRCAALGALSTSAVHVSATDYNDPYWTNPEVNSDFVDNFNQTQIDRSKWLVETNIFVNGEDIDYQDVEYPQADWTIGVGQDDPAAIDGKALILKARYMDGEVQDYYGGDPANPGKPLFIRSGRIESQITDDTTFTYGKFEARLKMPPARNGEFPAWWLLGNFPDVGWTACQELDIMEFTGNNGMNIPQTYWTAPYAVHGGTTVGLAGLGITNPQEQYVTYGIIKTPSKVEWYINGVLTNTFSRDNQGDDQPWPYVTPMRMILNHAITHVEWPDVGNYNAYSPDANRPSATGWSYVDNNGVTQYEYIDVDAMNANIGRAGTDFVVDYVAHWPLPTSDAEHKYVDDSKSSFFRESGNTKGFYNLKGWLAPVSVTADGFDQPGWDTDVRDNGADNAADGYVGSKWATPNDDGIHWVEVDYGQDKQINYLWLEWAWNLPADYDIYGKSSTGAWEFITSSQQEVATWATHVFDVNRTYRYLKLVTKGRIDKSSPIWLLELMAFEDVPNMYPKPAGTTMPNRSVNVLNNGNFSQGLDSWGTEAFDGANPTYNVQNGAAVIALTNDGGLSGSVQLHTSGFGLKRDYRYHISFDARADVARNLMVRLAENNLNPSAAGTYHVETVAVGTSFNTYSFTYDYTGQGEPARLAFLLGGMGTATTYIDNVVIREGDFIGSGEPLVAAISSTNFVSASNGWETEWWGAPARAVDGNLGNKASGNDGEAEGMDLDITVRIDEHYDVRAVLVAGDNSPERSLDQFRVEFGNGTPLMGWTDSTTEGVYEEFANFNNTPAAGERDFKFFFRPPAGQLVEVADVQLLAVDLMPHRISAIALDEGGTISPAGTTRYSRNNTDDATYTFTAPQGQSVSNVIVDGVSMGPLNSYTFTDINADHTLAVSFGGEVEQPETGDAINYAPEAYATASSELQTAALANDGDAGSRWESEHGAGPSWLALELNDTVRVSKVVIDWEAANAGTYEIQGSLNGIDWNTLEVVSGGAFGNRTDTVLLDGSASNSVNHIRIYGVERSAGNNWGYSIFNVEVWGEAGDTSMEEEVEIEPVSAAASSDFQAAANAIDADAGSRWESAHADATAHLTLDLASTYKLVSVAIDWEAANAGAYTLEGSSDGVNWTTIASFTGGAFGNRTDTLTVSGSHRFVRINCTEKSAGNNWGYSIYDVRLTALLPTP

SEQ ID NO: 162 - DNA, 3624 bp, Microbulbifer degradans
atgcaaccgtctgcgtacggtttgtattgtgctgcgtgttattcacaaaaatcaaagtgtgagtttatcatgattaaaaataacctaattaaatatgccgttagatgtgcagccttaggcgcactctctacaagtgcagtacatgttagtgctacagattacaacgacccatattggacaaaccccgaagtgaattctgactttgtggataatttcaaccaaacccaaattgaccgaagtaagtggttggttgaaacaaatatttttgtaaatggcgaagatatcgattatcaagatgtggagtacccacaagccgattggacaattggcgtagggcaggacgaccccgccgcaatagacggcaaggcgcttatattaaaagcgcgctacatggatggagaagtgcaagattactacggcggtgacccggcaaacccaggcaagccattgtttattcgttcggggcgtattgagtcgcaaataaccgacgatacaacttttacctatgggaaattcgaagcccgattaaaaatgccgcctgcacgcaacggcgaattccccgcgtggtggctattaggtaactttcctgatgtgggttggaccgcttgccaagagttagacattatggaatttaccggcaacaacggtatgaatattccacaaacctattggaccgccccctatgctgtacacggtggtacaacagtcggtttagcaggccttggtattactaatccgcaagagcagtatgttacttacggtattattaaaacgccgtcaaaagtagagtggtatatcaacggtgtgctcaccaatactttttctcgcgacaaccaaggtgacgatcaaccttggccgtacgtcacccccatgcgcatgattttaaaccacgcaattactcatgtggaatggccggatgtaggtaactacaacgcttattccccagatgccaacaggcccagcgccacaggttggagctatgtggataacaatggcgtaacccaatacgaatatattgatgtagatgcaatgaacgcaaatatcggtcgggcgggtaccgattttgttgtggattatgttgcccattggccgctacctactagcgatgccgaacacaaatatgtagacgatagtaaatccagctttttccgcgaatcgggtaacactaaaggcttttacaatttaaaaggctggttagcgccagtgtcagtgactgctgatggatttgatcaaccaggttgggataccgatgtgcgcgacaatggcgccgataatgcagctgatggctatgtaggctctaagtgggcaacacccaacgacgacggtattcattgggttgaagtggattacggccaagacaagcaaattaattacttgtggttagagtgggcgtggaacctacctgccgattacgatatatacggtaaaagcagtactggtgcttgggaatttatcacctcgtcacaacaagaagtggccacgtgggctacgcacgtttttgatgtaaatcgcacttaccgttacctaaagctcgtaacaaaaggccgcatagataaatctagccctatttggttgttagagcttatggcatttgaagatgtgccaaatatgtaccctaaacctgcgggtaccacaatgcctaaccgatccgttaacgtgctaaataatggcaatttttcgcaagggttagatagctggggaaccgaggcctttgatggcgcaaacccaacttacaacgtgcaaaatggtgcggcagtcattgcgcttacaaacgatggtggcttatcgggctctgtgcaattgcacacttcaggttttggtttaaagcgtgattatcgctatcacataagtttcgatgctcgcgccgatgttgcacgaaatttaatggtgcgcttagcagaaaacaaccttaacccaagcgcagctggcacctaccatgtagaaaccgttgctgtggggacaagctttaacacctatagttttacttacgattacacggggcaaggtgaacctgctcgactcgcatttttactgggcggaatgggtactgcgaccacctatatcgataatgtggttattcgtgaaggtgactttattggcagtggtgaaccgcttgtagcggctattagctctaccaactttgttagcgccagtaatggctgggaaaccgaatggtggggtgcgcctgctcgtgcggtagatggaaacttaggtaataaagcgagcggtaacgatggtgaagccgaaggcatggatcttgatattaccgtgcgtattgacgagcattacgacgttagagcggtattggttgcgggcgacaattcacctgagcgaagtttggatcagttccgcgttgagtttggcaatggcacacctttaatgggctggaccgacagcacaacagagggtgtatacgaagagttcgcaaactttaataacacgcctgctgctggcgagcgcgattttaaattcttcttccgcccacctgcagggcaactggtagaagtggccgatgtgcaattgctagcggtagatttaatgccccatagaatttcagccatagcgttagacgagggcggcactatttcgccagcaggcactacgcgctacagcagaaacaacaccgatgatgcaacctacacgtttaccgccccacaagggcaatcggtaagtaatgtgattgtggatggcgtgtcgatgggaccgttaaatagttatacttttaccgatatcaatgctgatcacaccttagcggtaagctttggtggtgaagttgagcaaccagaaactggcgatgctatcaactatgcgcccgaggcttacgcaactgcgagttccgagttacaaacggcggcgttagccaacgacggcgatgcaggttcgcgctgggagagtgagcacggtgcaggcccttcgtggttagcgctagagttaaatgacacagtgcgcgtatccaaagtggttattgattgggaagcggcaaacgctggcacctatgaaattcaaggctcgctaaacggtatagattggaacaccttagaagtcgttagtggtggagcctttggtaatcgtacggatacggttttactagatggctctgctagtaattctgtcaaccatattcgtatatacggtgtagaacgcagtgctggcaacaactgggggtattcaatctttaacgttgaagtatggggcgaagcaggtgatacctcgatggaggaggaagtagaaattgagcctgtatccgcagcagctagcagtgattttcaagcggcagcgaatgcaatagatgccgatgctggtagtcgctgggaaagcgcgcacgcagatgctaccgcacacttaacattggatttagcatcaacctataaactcgtgtcagtcgctatagattgggaagctgccaatgctggagcttacaccctagaaggttctagcgatggtgtaaattggacaaccattgcaagcttcaccggcggtgctttcggcaatagaaccgatactttaacggtgagtggcagccatagatttgtacgcattaactgtacagaaaaaagtgcaggcaacaattggggctattccatttatgacgtacgtctaactgcattattacctacgccttaa

SEQ ID NO: 163 - protein, 331 aa, Microbulbifer degradans
  VARIANT (313)..(329): Wherein Xaa is any amino acid.
MKKVFSLIIGLSLSLPVWAGWERQWIDTFDGDSVDWTNWTAQVEANYNNEVQCYTADETSANKNYDVSDGTLKIIARKQSVECAGLGGQNKTWTSGRLNSKDKQEFLYGRIESRIRFHNLEGGTWPAFWMLENRISETPRKYDDDYEQWPNPGAGEIDVWEWFSNGPNIYIINFFNANNCGDRHDYVYPNGGSDVLNWHNYAMEWDANNISFFIDGSLITSFDVSSCPQYKEKMFVLLNLAVGGNLGGTIDPNLSLATLEVDYVGYCTATNANDYASCDETTPAALQGEPSTSWVLSTVNATATLANAAQNSXXXXXXXXXXXXXXXXXKL

SEQ ID NO: 164 - protein, 707 aa, Microbulbifer degradans
  VARIANT (14)..(30): Wherein Xaa is any amino acid.
MLPPRLPMQRKIAXXXXXXXXXXXXXXXXXNYNNEVQCYTADETSANKNYDVSDGTLKIIARKQSVECAGLGGQNKTWTSGRLNSKDKQEFLYGRIESRIRFHNLEGGTWPAFWMLENRISETPRKYDDDYEQWPNPGAGEIDVWEWFSNGPNIYIINFFNANNCGDRHDYVYPNGGSDVLNWHNYAMEWDANNISFFIDGSLITSFDVSSCPQYKEKMFVLLNLAVGGNLGGTIDPNLSLATLEVDYVGYCTATNANDYASCDETTPAALQGEPSTSWVLSTVNATATLANAAQNSGAIAFETSAFGENASDPMIYQAGQNITAGKEYTLAFDVRSNTAGRAFRAFVAASAEASQGILDQEVVVANADAWQFVSLNFTSEQTFNDAVIAFQSGTAALGNGELLFKNIVLTEHSTLYSTTVVTNAGGSINPPGPTVKTVSGYSSHFTITANVTHAIGDVFIDGVSVGPVAEYTFDNIQGDHEIEVQFVALPPPEGTEILTPVAATASSSLSVASRAIDGDYATRWESRHGIEATWLELDLGTAVDLHSILINWEAANAKAYTLEGSNDGENWTVLASVTNGTFGDRADELSLTGSYSHLRINATERSAGNDWGYSIWDIVLYAYTQDQNASSSSSSSSNSTTSSSSSSSTSSSSSSSSSSSSSSSSSSGGSEPASSGSGRMDGVVFLFLMVLFGLVTQRVVLAKLVS

SEQ ID NO: 165 - DNA, 2124 bp, Microbulbifer degradans
  misc_feature (40)..(89): Wherein n is a or c or g or t.
atgctaccgccacgcttgccaatgcagcgcaaaatagcgnnnnnnnnnnnnnnnnnnnnnnnnnnnnnnnnnnnnnnnnnnnnnnnnnnaaattataacaacgaagtgcagtgttataccgcagatgaaacatccgctaataaaaactacgacgtatctgacggtacgctaaaaataatagcaagaaagcaatccgtcgagtgtgcaggcctaggtggccaaaacaaaacatggacatcagggcgattaaacagcaaagataaacaagagttcttgtatggccgtatagaatcccgcattcgcttccacaacctagagggcggcacgtggccggcattttggatgctcgaaaaccgcatatccgaaaccccgcgtaaatacgatgatgattacgagcaatggcccaaccccggtgccggtgaaatagatgtgtgggagtggttttcgaacggccctaatatttacatcataaacttctttaatgctaataactgcggcgataggcacgattacgtttacccaaatggcggcagtgatgtactaaattggcataactatgccatggagtgggatgcaaataacattagcttttttatagatggcagcctgattacctcgtttgatgtgtcttcgtgcccgcagtacaaagagaaaatgtttgtactactcaacttggccgttggcgggaatctaggtggtactatcgaccccaatttatcgctcgcaacattagaagtggattacgtaggctactgcacagctaccaatgctaacgactacgcaagctgtgatgaaacaacacccgctgcattgcaaggtgagcccagcacatcgtgggtgttaagcacagtaaatgctaccgccacgcttgccaatgcagcgcaaaatagcggagccattgcgtttgaaacaagcgctttcggcgaaaatgcatcagaccctatgatttaccaagcagggcaaaacatcacagccggtaaagaatataccttagcgtttgatgtgcgatccaatactgccggccgcgcctttcgtgcatttgtggcggctagtgccgaagcctcgcagggtatattagatcaagaagttgtggttgcaaatgcagacgcatggcaattcgtaagtttaaacttcacgtcagaacaaacctttaacgatgcggttatagcgtttcaatccggcactgcagcactgggtaacggtgagttgttgtttaaaaatatagtgcttaccgagcattccaccttgtactcaacaacggttgttaccaatgctggtggttcaataaaccctcctgggcctacagtaaaaaccgtaagcggttacagtagccactttacaattactgcaaatgtaacccatgctattggcgatgtgtttatcgatggcgtaagcgttggccctgttgccgaatatacgttcgacaatatacaaggcgaccacgaaatagaagtgcagtttgttgcactgccgccccccgaaggtaccgagatacttacccctgtagccgccactgcgagcagttcacttagtgttgcgagcagagcaatcgatggcgactacgcaacccgctgggaatcgcgccacggtatagaggctacgtggctagagttagatttaggcacagccgtagatttgcactccatactcataaactgggaagccgcaaacgcaaaagcgtacaccctagaaggctctaacgatggcgaaaattggacagtactcgcaagcgtaacgaatggcacctttggcgaccgcgccgatgagctatcactcactggcagctactcacacctgcgaataaacgcaaccgaaagaagcgcgggtaatgattggggctattccatttgggatatagtgctatacgcatacacgcaagatcaaaacgcaagtagcagctcgtctagttcttcaaacagtacaacctctagttcttctagctcatccacttcttcgagtagctcttcctcaagctcttctagttcatcttcaagttctagctctggcggcagtgaacctgcttcgagcggtagcggcagaatggatggtgttgtttttcttttcttgatggtgttgtttggtttggttacacaacgcgtcgtgttagctaaattagttagttaa

SEQ ID NO: 166 - protein, 573 aa, Microbulbifer degradans
MEATMIKTCKTTPAKWAAALSLGCALLLPSGVNAATFQAEDYSAFYDTTAGNTGGAYRNDNVDIEATNDNGGGYNVGWIDANEWLVYPGVNITTTGDYVINVRVASASGGALSVDFNAGSIPLGQFDIPNTGGWQNWVTVSKTVTLTAGTYDMGVFASTGGWNFNWIEVTPVNNGGGNGGGSATFFQAEDYSNYSDTTPENIGGAYRNDGVDIETTSDANGGHNIGWMENGEWLAYEGLSIPSNGNYIIKARVASPNGGALSFDLNGGGQVLGTMNIPATGGWQNWQTVELSTNINAGTYTLGAFVSTSGFNLNWIEVVAGGDGGNNGGGGGNITWRDEFDTINRDVWNFETGGGGWGNNELQYYTDGQNASIQFDPQAGSNVLVIEARKETGGQCWWGGNCGYTSSRMNTRFKKSFQYGRIEARMKLPRTQGIWPAFWMLGDNFNNVGWPQGGELDIMEHVGTNNITSGALHGPGYSGNTPITGHLEHGASIDSGYRVYAVEWDTNGIRWFVDGTNFYSVEKWQVQQYGEWVYDQPFWILLNLAVGGNWPGDPDHANFTTQRFYIDYVRVIQ

SEQ ID NO: 167 - DNA, 1722 bp, Microbulbifer degradans
atggaggctacaatgataaaaacatgcaaaaccacaccagccaagtgggcagcagcccttagcttaggctgcgccctacttttaccctcaggcgtcaatgctgccaccttccaagcagaagattacagcgccttctacgacaccaccgcgggtaacactggcggcgcctaccgcaatgataacgtcgatatagaagccaccaatgataacggcggcggctataacgtgggctggatagatgccaacgaatggctggtatacccaggcgtaaatatcaccaccaccggcgactatgtaattaatgtacgcgtggcgagcgcaagcggcggtgcactttctgtcgactttaatgcaggctctattccactgggtcagttcgatattcccaacactggcggttggcaaaactgggtaaccgtttcaaaaacagttactttaactgccggcacctacgatatgggcgtattcgcctctaccggcggctggaactttaactggatagaagtcacacccgttaataacggtggtggcaatggcggcggttcagccacgttctttcaagcggaagactacagcaactactccgacaccacacccgaaaacattggcggcgcctatcgcaatgacggtgtagatatagaaaccacaagcgatgccaacggcggccacaatataggctggatggaaaacggcgaatggcttgcctacgaaggtttatctattcccagtaacggcaactacatcattaaagcgcgtgtagctagccccaacggcggcgcactatcgtttgatttaaacggcggcggccaagtgcttggcacaatgaacatacccgctactggcggttggcaaaattggcaaaccgtagaattgagcaccaacattaatgccggaacctatacgctcggcgcctttgttagtactagtggctttaacctaaattggatagaagtcgttgccggtggcgacggcggcaataatggtggcggtggtggcaacatcacttggcgcgatgaattcgacacaatcaaccgcgatgtttggaattttgaaaccggtggcggcggctggggtaacaacgaattgcaatactacaccgacggccaaaacgcttccattcagttcgacccgcaagccggtagtaatgtgttagttatcgaagcccgcaaagaaaccggtggccaatgttggtggggcggcaattgcggttacacctctagccgcatgaacacgcggtttaaaaaatcgttccaatacggccgtatagaagcacgtatgaagctgccgcgtacccaaggtatttggccagcgttttggatgctaggtgacaactttaataatgtaggctggcctcaaggtggcgaactagacattatggagcacgtaggcaccaacaatatcacatcgggtgcattgcacggcccaggctacagcggtaatacgcccattaccggccatttggagcacggtgcaagcattgattctggctaccgtgtttacgcagtagaatgggataccaatggtattcgctggtttgttgacggcaccaacttctacagcgtagaaaaatggcaagtgcaacagtacggcgaatgggtttacgaccaacctttctggatactgctaaacctagcggtgggaggcaactggcccggcgacccagaccacgccaactttactacccaacgtttttacattgactatgtgcgggtgattcagtaa

SEQ ID NO: 168 - protein, 742 aa, Microbulbifer degradans
MKKLKLLELSLVVLVALGLASCGGSDDKKTPDPVEEPVGEPESEPESEPESEPESEPEPENAWQLLWEDNFDSEISASNWGFEVNCTGGGNNEKQCYTDRADNAYVDEAGILHIVAKEEAFSGPAIQDDDPNYNPDDTSAARNYTSARLRTLDKFDFKYGRVEIRAQIPGGQGSWPALWMLPSDKVYGGWPASGEIDIMEAVNLDTDAANAVHGTLHYGLQWPQWSTIGASYETNDDFTGEFHTYAIEWEADQIRWFVDGVHTQTQVSDNWYNFVWGGQESGFAVANPRAPYDQEFHLIMNVAIGGNWPGDPDTGWASDREMLVDYVRVYQCDSEADDGTGCANATDAVDIAISPTADVGAPSQVEYDLYSDGLQTPAFTNAGVTLAANVWQETEGNVVTTTGNLGDDHGDAWEITFNGTGNVSIAIAEQDGVESYVRLNGGTAWSNYGVLAFDMYVDSVDAETGFVVKMDSVYPNVGAVDIATPAAGEWTRVHVKVADILANPIAGGGGLNVAQAVNLFVLEPTGTKTAHVYVDNISISCAYNSTAKSWQGDKTCDVAAVPTADTSGIDLSGNELVIFDEQEPDFWGFGQFSAGGAEVAMSFLADPEDASHGNVLGFSYPDSQNVAYLQSATPLNLSDWAGGTIQFDMYVISEPANVNWMMKVDCVHPCSSGDIPLTTNIDGVVPAVGVWQTYRFNLDALVAGNPGLDLTKVDTPLVIFPAWDNQTGANFRIDNIKFVRAN

SEQ ID NO: 169 - DNA, 2229 bp, Microbulbifer degradans
atgaaaaaactaaagcttctagaactttcgctggtggtgttggtagccctagggctagcgagctgcggcggttctgacgacaaaaaaacgccagacccagtagaagaacccgtgggtgaaccagaatcagagcctgaatcagagccagaatctgaacccgaatctgagccagaaccagaaaacgcatggcaattgctgtgggaagataatttcgacagcgaaataagcgcatctaactggggcttcgaagttaactgcaccggcgggggtaacaacgagaaacagtgttataccgatagagccgacaacgcttatgtagatgaggcaggcatactgcacatagttgccaaagaggaagcatttagcggacccgctattcaggatgatgaccccaactacaaccccgatgacacatcggctgcgcgcaattatacctctgcgcgtttgcgtacattagataagtttgacttcaaatatggtcgagtcgaaattcgtgcgcaaataccaggtgggcagggctcatggcctgcattgtggatgttgccaagtgacaaagtatatggtggttggccagccagtggcgaaatcgacattatggaagcggttaatttagatactgatgcggccaatgccgtgcatggtactttgcactacggtttacagtggccacaatggtcgacgataggcgcttcttacgaaacaaatgatgatttcaccggtgagttccacacttatgccattgagtgggaagcagaccaaattcgctggtttgtggatggcgtacacactcaaacacaggtgtccgataactggtacaactttgtatggggcgggcaagagtccggctttgctgtggctaacccgcgtgcaccttacgatcaagagtttcatttaatcatgaacgtcgctataggcggcaactggccgggtgacccggacacgggttgggcatctgatcgcgaaatgcttgtagattatgtgcgtgtgtaccagtgtgattctgaagccgatgatggaacaggctgtgcaaacgcaaccgacgccgttgatattgctatttcaccgaccgcagatgtaggtgcgccatcacaagtagaatacgacctatatagtgacggtttacaaacgcctgcatttaccaacgccggcgtaactcttgctgcaaatgtttggcaagaaacagaaggcaacgtagtaactaccactggcaacttgggcgacgaccatggcgatgcttgggaaattacctttaatggtactggtaatgtatctattgctattgccgagcaagacggcgtggaaagctatgtgcgattaaatggcggaacagcttggagtaactacggcgtactagcgtttgatatgtatgtagatagcgtggatgccgaaactggctttgttgttaaaatggacagtgtttaccccaatgtaggtgctgtagatattgctacacctgccgcaggtgagtggacgcgagtgcacgtaaaagtggctgatattttagctaacccaattgcaggtggcggtggccttaacgttgcgcaagcggttaacttgtttgtacttgagccaacaggtactaaaacagcacatgtatatgtagataatatttctattagctgcgcatataactctactgcaaaatcttggcagggtgataaaacctgtgatgttgcagcggtgcctactgccgatacctcaggtatagatttaagtggtaacgagcttgtgatttttgatgagcaagagccggatttttggggttttgggcagttttctgctggtggtgctgaagtagcaatgagcttcttagctgacccagaagatgcgagtcacggtaatgtgttgggctttagctacccagatagccaaaacgttgcctacttacaatctgctacaccgcttaatttaagcgattgggctgggggtactatccaattcgacatgtacgttattagcgagcctgctaatgtaaattggatgatgaaagtggattgtgtacacccttgttcatctggcgatataccgctcaccaccaatattgatggtgtagtgcctgctgtgggtgtatggcaaacctatcgctttaacttagatgcattagttgctggcaacccagggttagatttgaccaaagtggatacgccgctagtaatattccctgcatgggataaccaaaccggtgctaacttccgtatagataacattaaatttgttcgggctaactag

SEQ ID NO: 170 - protein, 881 aa, Microbulbifer degradans
MGLTMVKNKLYLALSIAAATSLTACGGGGDAADDTVKRNVFAVGDVFKTQEDGDAVEADVSENDFGRGLTFALESGSTTANGELVFNADGSFTYTPNADFSGKDSFTYVATHTASGDTASALVTINVISDFETIEESGWTLTWSDEFDSLDSMAWDAMNASASEGVLSVSAVEGQTSYVKSTAALGQAGRIEASIQLPDGKSLYSGFGLMPMADMFDGKNALMAIESANNKATAGGHWGIGLVNGVEINEPTNAVVRAEFHTYAIEWNESLIRWYIDDIHIHTVDTLNTWSYNLSGDTVVADTTTKPFSQDLQIMMELTAASSGLPNAMLVDFVKVYECDTSVTDQIESCAFAADENVDKLASNRIESVGEIVTPLFTDELTSLSWHYSDAEEAVTFVTEQESAVPTHRGIVSQPDVMEPVAEVAPVDPVEEGEEGYEEYQAYLAYVDYLNYLETLAFLDTVDPSRERGAVIRYQSDASTWSNFSLNTPSLGLVGKDSALQFDMYIDSASTTTETIEIRMETGWPFLGTVLLNVADLQLDTWVTYNIPVSDFLANPFITPDWAVGQDWFLGGNGVEGQPLYLDTNSITKAIVVQLAAPGHLVFDNVAITCVSNESCFQGPLAKQPIVKAGPAPIIYEAEAYTAVTGEVQTEDTQDAGGGQNVGYIDAGEALEYTIVAPIDGTYKFQYRLASGLESASEFDVSIDDMLIDGQSLPGTGGWQVWTTLESGEFDLTAGEHAIVFNFAGGMNFNWFAIVPPPIAIFIEAEDYSSMAGVQLEDTADEGGGQNVGYIDAGDFLQYNVEVPADGTYFIELRVASSGGSDGFTITSNGITTSTIPVADTGGWQNWTTQTVEMQLSAGQQTLRFDFIGGAINFNWINVTN

SEQ ID NO: 171 - DNA, 2646 bp, Microbulbifer degradans
atggggttaacaatggttaagaataaattgtatctagcgctatctatagcggctgctacaagcctaacggcatgtggtggtggcggggatgcggctgatgacactgttaaacgcaacgtatttgccgtaggcgatgtgtttaaaacgcaagaagatggcgatgcggttgaggcggatgtaagtgaaaacgattttggcagaggcctcacgttcgcattagaaagcggtagcaccacggctaatggcgagctggtattcaatgccgatggctcttttacgtatacacccaatgcggacttctctggtaaagactcctttacctatgtggccacccacaccgcatcgggcgatacagccagtgccttggtgactattaacgtaataagtgactttgaaaccatcgaggaatctgggtggacgctaacgtggtccgacgaattcgatagtttagatagcatggcgtgggatgcgatgaacgcatctgcttctgaaggtgtgttgtcggtaagcgctgtagaagggcaaacatcttacgttaaaagcaccgctgcactggggcaggctgggcgtattgaggcgagcattcagttgcccgatggtaaaagcttgtactctggctttggcttaatgccaatggccgacatgttcgatggtaaaaatgcattaatggccatcgagagcgcgaacaataaggcaactgctggtggtcattggggtattggattagtaaatggtgttgaaattaatgaacccactaacgcagtagtacgtgcggaatttcatacctatgccatagagtggaatgagagtctgattcgctggtatatagatgatatacatattcataccgtagatacccttaatacctggtcatacaatttaagcggcgataccgtggttgccgatactaccactaagccgtttagccaagacctgcaaataatgatggagttaacggcagcaagttcaggtttgccaaatgcaatgctggtagattttgtaaaggtttatgagtgtgacacgtctgttaccgatcaaatagaaagctgcgcattcgcggctgacgaaaatgtggataagcttgcttccaaccgtattgagtcggttggtgaaattgttaccccattgttcacagatgagcttacatcgttaagctggcattactctgatgccgaagaagctgttacttttgttacagagcaagaaagcgctgtgcctactcatagaggtattgtttctcagcccgacgttatggagcctgtagcagaagttgcaccagtggaccctgtagaagaaggtgaagagggctacgaggaatatcaagcttacttagcttatgtggactacctgaactatttagaaactctcgcatttttagatacagtggacccaagccgcgaacgtggcgctgttattcggtatcaatcggatgcaagcacatggtctaattttagtttgaatactccgagcttaggcttagttggaaaagattccgcgctgcagtttgatatgtatatcgatagcgcatctacaactaccgaaaccatcgaaatacgcatggaaaccggttggccattccttggcactgttctgctaaacgttgcagacttgcagctagatacttgggtgacgtacaacattcccgttagcgactttttagccaatccatttattacacccgattgggcagtgggccaagactggttcttgggcggtaacggtgttgaagggcagcctctctatttagataccaattcaattactaaagccattgtggttcagctagcagcaccagggcatttagttttcgataacgttgcaattacttgtgtttcgaatgaaagctgcttccaggggccattagccaaacagcccatcgtaaaggccggtcctgctcccattatttacgaagcagaagcttacacggcggtaacgggtgaagtgcaaacggaagatacccaagacgcgggcggcggccaaaacgttggctatatcgacgcaggtgaagcattggaatacaccattgttgcacctatcgacggtacctataaattccaatatcgcttggcaagtggcttagaaagcgcttctgagtttgatgtttctatcgacgatatgcttatcgatggccaaagcctacctggtactggtggctggcaagtgtggaccacattggagtctggtgagtttgatctaactgctggtgaacacgctattgtgtttaattttgctggcggtatgaactttaactggtttgcaattgttccgccccctattgcgatttttatcgaagctgaagattactcgtcaatggctggtgttcagcttgaagacaccgcagatgaaggcggcggtcaaaatgttgggtatatcgacgcaggtgatttccttcaatacaacgtcgaagtgccggctgatggtacctacttcattgaattgcgtgtagccagcagtggtggtagcgatggctttaccattacttccaatggcattactacaagcactattcctgtagcggataccggtggttggcaaaattggactactcaaactgtagagatgcaattgtctgctggtcaacaaacacttcgtttcgactttatcggtggggccattaactttaactggatcaatgtcaccaactaa

SEQ ID NO: 172 - protein, 1186 aa, Microbulbifer degradans
MILRLIRAAIYIVAFVSLIACGGSSTSKPAQPDIPDTDLPDTGTPEPENSDPVVQSTPATAIAAGNVYSYQIMASDADESDVISYAAVTLPSWLAFDPDTGILTGTPQQAHAGNAEVVLSYSDGNVTLQQQFTIAVSASYTEEPPTPMSRPTVNAADTSTYTITAYGAGSIADAINPASYGCVYDYGNWIYNAGVVEPGVSGCDPIGAPTYRTPQVVGEAASVPTPTHKWWGSVSFLGEMKIGDPAGAGYITPDPITARISNKGVRIMGIPNGLGAQGNQFIYSVPDPFSEVFDGIAVANSEYANLEAYLKSYSDGTATVQWQSGNLPVMQATFVHGSPYVFFKAYRGNMVLRTKAADGGEKGTFYNENNSLGIWTSVAGNKNDFLITGEGETVFNNIETDTITLTNAANEFTLTLLPTAGAGTPSSTVIQAFEDSARAVVAKVDIQYSVDRTNNMVTVTHTYKNESNTPVQTLAGLLPMHWKYSDTALSGYKTRSARGMVQFAHIDSFSYTIPYVGVLPYLPSSVGDFDSSVLAGLVQAFVAEGPENWNPHTDTYWSGKAFNKVAELSAIARSVGMTSEADTLLNWLKAELQDWFSANTNGSLDEKKYFVYDAEWNTLLGLEESFAAHQQLNDHHFHYGYFVRAAAEICRVDASWCGADQYGPMVELLIRDYAGAKDDTMFPYVRNFDPANGFSWASGSANFVLGNNNESTSEAANAYGAIILYGLITGDNELVERGMYLHASSSVAYWEYWNNIDRYLGADADRDNFPSGYDKLTTSIIWGHGGVFSTWFSGAYAHILGIQGLPTNPLIFHVGLHPEYMEDYVALGLSESSNNKPSGLIDDQWRDIWWNLWALTDAEAAIADYNTVGSNYAPEFGETKAHTYHWLHTWNALGHLKTGTGELTVNDPAALVFEKDGIKTYVAYNFSGTPKTILASDGFEFIAQPNDFTVVTTADNNPDDTQPPTLPANLQALNLTQTSLDVKWDASTDNYRMAGYVVQVLQADTLIEETSSIASIASFNNLTASTSYTIQVKAKDRSGNETAWVSITVTTPSETDDLLPTLDGGVYSANVGPNSADLSWAAATDDRGIASYTIEVQVGGAVFVTETVFDTSYALSGLTEATEYNVAVYATDTGGQQSATISGIVNTTSNPFGSGCELICASATSSSSVTFTVHQAGAVDIHYLVN

SEQ ID NO: 173 - DNA, 3558 bp, Microbulbifer degradans
atgatactgcgactgatacgtgccgcaatttacattgtggcgtttgtttctcttatcgcctgtgggggctcaagcacatccaagcccgcgcaaccggatattcccgatacggatctgcctgacacgggaacacccgaacccgaaaacagcgatccagttgttcaatctacgccggctacagccattgcggcgggcaacgtgtatagctatcaaataatggctagcgacgcagacgaatcggatgtcattagctatgcggcggttactttgcctagctggctggcgttcgacccagataccggaatacttaccggcacgccccagcaagctcatgctggtaatgctgaagtggtgcttagctatagtgacggcaacgtaaccctgcagcagcaatttacaattgcagttagcgcgagctacaccgaagagccaccaacaccgatgagtcgcccaaccgtaaatgcggcggataccagtacttacactattactgcctacggcgcgggcagtattgcggatgcgattaaccctgctagctatggctgtgtgtacgattacggtaattggatttataacgccggcgttgtggagccaggagtaagcggctgtgaccctataggcgcaccaacctaccgtacaccgcaggtggttggggaagcggcaagcgtgccaaccccaacgcataaatggtggggctcggtttcttttttaggtgaaatgaaaataggtgacccggcaggcgcaggttacataacgccagacccaataactgcacgtatctcgaataaaggcgtgcgtattatgggcatacccaacggcttgggcgcgcaaggcaaccagtttatttactctgtacccgacccttttagcgaggtattcgatggaatagcggtagcgaatagcgaatatgccaacctagaagcgtatttaaaatcctacagcgatggcaccgctaccgtgcaatggcagagtggcaacctgccggttatgcaggccacatttgtacacggctccccctatgtgttttttaaagcctatcgcggcaacatggtgttgcgcaccaaagctgcagacggcggtgaaaaaggcacgttttataatgaaaataatagtttaggtatttggaccagtgtagcgggtaacaaaaatgactttttaattaccggtgaaggcgaaacggtttttaacaatatcgaaaccgataccattacgttaaccaatgcagcgaacgaatttaccttaacgttattacctacagcgggcgccggtacaccttcaagtactgttattcaggcgtttgaagatagcgcccgtgcagtggttgccaaagtagatattcaatactcggtagaccgtaccaataacatggtaacggttactcatacctataaaaatgaaagcaatacgccagtgcaaaccctcgcggggttactgcccatgcattggaagtattccgatacagcattaagcggctacaaaacccgaagtgcgcgcgggatggtgcaatttgcccatattgattcgtttagctacaccattccttatgtgggagtattaccgtatttaccgtcatcggtaggggatttcgattcctctgtgctcgcaggcttagtgcaggcgtttgtagctgaagggccagaaaattggaacccgcacaccgatacctattggtcgggcaaagcgtttaataaagttgccgagttatcggcaatagcgcgctcggtaggtatgacaagcgaagcagatacgctgttaaattggcttaaagccgaactgcaagattggtttagcgccaacaccaacggcagtttggatgagaaaaaatactttgtgtacgatgccgagtggaataccttgcttggcctagaagaatcttttgctgcacaccaacaactaaacgatcaccactttcactacggctattttgtacgcgccgctgcagaaatatgccgagtagatgcaagctggtgtggcgcagaccagtatggtcccatggtggaactgcttattcgcgattacgccggtgccaaagacgatactatgttcccttacgtgcgtaacttcgaccccgccaatggcttttcttgggcatcgggtagtgccaactttgtgctgggtaacaacaacgaatccacatccgaagcggccaatgcctatggtgcaattattctgtacgggttaataactggcgataatgagttagtggagcgcggtatgtatttgcacgcgtcttcgtcggtggcctactgggaatattggaacaacatcgaccgctacttgggggccgatgccgaccgcgataattttccatcgggttacgacaaactaactacctctattatttgggggcatggcggcgtgttctctacctggttcagtggcgcttacgctcatattcttggtattcaagggctgcctaccaacccgcttatttttcatgtgggcttacaccccgagtatatggaagactatgtggcactgggtttaagtgaatcgagcaacaataaaccttcggggttaatcgacgatcagtggcgcgatatttggtggaacctatgggccttgactgatgcagaagcggccatcgccgattacaacacggtaggcagtaactatgcgccagagtttggtgaaaccaaggcgcacacctaccactggttgcacacgtggaatgcgctcggccatttaaaaaccggcactggcgagctaacggtaaacgaccccgctgcattagtgtttgaaaaggacggaataaaaacctacgtagcgtataactttagcggtacaccaaaaactattttggctagcgatggctttgagtttattgcgcagcccaatgattttaccgtggtgaccaccgccgataacaaccccgacgacacgcaaccgcctacactaccggcaaacttgcaagcgcttaaccttacccaaacgagcttggatgttaaatgggatgcatctaccgataactaccgtatggcaggttatgtagtgcaggtattacaagccgatacattaatagaagaaacgtcttctatagccagcatcgcctcgtttaataacttaacggccagcacaagttacaccattcaagttaaagctaaggatcgctctggcaatgaaaccgcatgggtaagcattacggtaaccacgcccagcgaaaccgacgatttactaccaacacttgatggcggtgtatatagcgcaaacgtggggcctaactctgcggatttaagctgggcggcagcaacagatgatcgcggtatagcaagttacaccatagaggtgcaggttggcggcgcagtatttgtaactgaaacagtgtttgatacttcgtatgcgcttagcggattgaccgaagcaaccgaatacaatgtggcggtttatgctacagataccggcggtcaacaatctgccactattagcggtattgttaataccaccagcaatccatttggcagcggttgcgaattgatttgtgccagcgctacctctagctcatctgttacgtttactgtgcatcaagcgggcgcggtagatattcactacttagtgaac

SEQ ID NO: 174 - protein, 371 aa, Microbulbifer degradans
MGSSFLTCYKPSKEVITVKRAAINLVLIPGLAVSMGTLSSSAFAQSTCSVDYRVESDWGAGATHKVLVTNTGAPINGWQMSWTFSGNEQITNLWNGMFTQSSQSVIVDSLSWNAQLNTGATAEVGFNINSPSGQLPDVYLNGVNCSNPGEPEPEPEPEPEPEPEPEPEPEPEPEPEPEPEPEPEPEPEPEPEPEPEPELAYSLDATASFLNFVSSKKTHVLETHRFDVLSGGISTAGEAQLVIDLNSVNTGIDVRNGRMRDYLFETATYSVATVTVPVDLAAVAGLAVGEDMLVDVSATLDLHGVPGVIDTQLNVQRLSATRIMVQNQSPLLIKAADYSLEAGIETLRNLASLNVISTTVPVDFVLFYEAP

SEQ ID NO: 175 - DNA, 1116 bp, Microbulbifer degradans
atgggaagcagttttctcacctgttataaacctagcaaagaggtaataaccgtgaagcgagcagcaataaacttggtgctgatacccgggctagccgtaagtatggggacgttgtcgtcttctgcttttgcacaaagcacttgtagtgtggactatcgagtagagtccgactggggtgcaggggctacgcacaaagtattagttactaacactggagcccccataaacgggtggcaaatgtcatggactttttctggcaacgagcaaatcactaacctttggaatggcatgttcacccaaagctctcaaagtgtgattgttgatagtctgtcgtggaatgcccagctaaataccggtgccaccgcagaagtggggtttaatattaactctccttcagggcagttgccggatgtgtatttgaacggcgtaaattgtagtaaccctggtgagccagagccagagccagagccagagccagagccagagccagagccagagccagagccagaacctgagcctgagccagaacctgagccagaacctgagccagaacctgagccagaacctgagccagagccagagccagagccagaattggcctattcattagatgcgactgcatctttcttaaactttgttagctcaaagaaaactcacgttcttgaaacacaccgttttgacgtgctttctggcggtattagtactgcgggtgaggcacaacttgttatcgatcttaacagtgtgaacacaggtatagacgtgcgcaacggacgtatgcgcgattacctgtttgagactgcaacctattctgtagcaaccgtgactgtgcctgtagatctagccgcagtagcaggtttagccgtgggcgaagatatgctggtggatgtatccgcaactttggatcttcacggtgtgccaggcgttatcgatacgcagctaaatgtacagcgcttatcggcaactcgcattatggttcagaaccaatctccactattaataaaggcagccgattattcgcttgaggcgggtatcgagacattgcgtaatctcgcgagcctaaatgttattagcaccacggtgccagtggattttgttttgttctacgaagcgccttaa

SEQ ID NO: 176 - protein, 1042 aa, Microbulbifer degradans
MKKIFKISALSLGFSIAGAASAADLCNVTYEAVNSWGSGAQQAVTVVNNGPALNAWQLSWTFNGSENIDNLWDGVLSQTGANVTVNNAGYNGSVGTGGQFSFGFTVSGWSENFPTEFYLNGEACSGAVDPNPNPNPEPTDGAVWELNSADSVFSFVTVKKEHVAEVQTFTAYNATVDSDGVATLAIDLNSAETNIDIRNERFRNVLFETAFLPTLYYSVQLDMASLSALAVGDAQTQTLGGTLTLHGVQAVVEAEVLVVKTSATDLTVSTSKPILIKAADFDLVSGVESLRALASLSSIGQTVPVYFRLDFDAADPQVTNAVAVPATPAAPTSLTADFTESSGIAALNWNDASNNETEFLVRRREASTGYWSRLTEVNANSTLLDDLLLEEDTYDYKVIALNNGVPSAPSPVATVVATTNPNPEPLTGEEHYQAKCASCHGDDASGGVVGVALNTERDLTVMLNTIVTRMPPGEADNCDQECAEAIGGYIQTTFWNGGEPEPELACDTVTYGARQLKLLTKAEYQRSVEDLVGIDYNVASGLAEDNIIGYFVNNTTKVVVPTVYDQYLTVAEEIAQWSADRNFAGALTCGTNFNQTCANQFVNNFAPKVFRRALSSDEAAAYLAIANGSATNGDVKAGIQLAMEGLFSSPQFVYRHELGEANPNNNAIDSDAFELTSYEMATWLSYTYAGTTPDAIAMQKAANNQLRTDAEIRAEAQRLLEGAGAKQKMGDFVASWLGTDHIANAPKDASVWPGFDALIPHLQTEIREMFSYVMLEPTESFASVYNANYTFVNGPLAQHYGINGVSGNEFQKVTTTDRGGILANGAFMARWGESVESSPIRRSVRVRRRMLCQDQPDPPGNVNIGRENAADEFHEALADPTTTNRERYELLTSGETCATCHQEWINPLGFGMEDFTAVGTRRVTDLNGNTIDASGQLYAPENLNDKDVFINFNGTQGLGALLTTLPSAQSCLPQNLFRYSVGVGVEGLDDNPEGNELVPAERDGYACEVKNLTSTMLEQSPRAMLEGMGSMQAVRYRKAWAR

SEQ ID NO: 177 - DNA, 3129 bp, Microbulbifer degradans
atgaaaaaaatattcaagatttcagcgctctcgctaggtttctcaattgctggcgctgcatctgcagctgatttgtgcaatgtaacctacgaagcggtaaatagctggggctccggtgcccagcaagcggtaaccgttgtaaataacggccctgctttaaatgcctggcagttaagctggacatttaacggcagcgaaaatatagacaacctatgggatggcgtgctttcgcaaactggtgcgaatgttaccgttaacaatgctggctataacggcagtgttggtactggcggtcaatttagcttcggttttaccgtaagcggttggagcgaaaactttcccacagagttttacctaaatggtgaagcgtgtagtggagctgttgaccctaatcccaatcctaacccagagccaactgatggcgctgtgtgggagttaaactcagccgattcagtgtttagctttgtaactgttaaaaaagagcacgttgccgaagttcaaacgtttactgcctacaacgcaacagttgatagcgatggcgttgcaacgcttgctatagacttaaacagtgcagaaacgaacattgatatacgcaacgagcgcttccgcaatgtattgtttgaaacagctttccttcctactctgtactacagtgttcagctagatatggcttcactgtctgcattggcggttggcgatgctcaaacgcaaacgcttggtggcacgctaacactacacggtgtacaagcagtggttgaggctgaagtgttggttgttaaaactagcgctaccgacttaaccgtatcaacgtctaagcctattttaattaaggctgccgattttgatttggtaagcggtgtagagtctttgcgagccttggctagtctttcaagtattggtcagacggtacctgtttacttccgtttagacttcgatgctgcagacccgcaagtaactaatgcggttgctgttcctgctactcctgcggcgccaacgtctctaactgcagacttcacagaaagcagtggtattgccgcgttgaactggaatgatgcaagcaataacgaaaccgagtttttggttcgtcgtcgtgaagcgtcaaccggttactggtcaagactgaccgaagttaacgcgaacagtactttgttagatgatcttctgttagaagaagacacctacgactacaaagtgattgcattgaacaacggtgtgccttctgcgccatcgccagttgcaactgttgtagctactaccaaccctaacccagaaccattgactggcgaagagcactatcaagctaagtgcgcaagctgtcacggtgatgacgctagcggtggtgtagttggtgttgctttgaatactgagcgcgatttaaccgttatgctgaacaccattgttactcgcatgcctccaggcgaagcggataactgtgatcaagagtgtgcggaagcaattggtggttatattcaaactactttctggaacggcggtgagccagagccagaattagcttgtgacactgttacttacggtgctcgtcagttgaagctacttaccaaagctgagtatcaacgttctgttgaagacttagttggtattgattacaacgtagcaagcggcttagcagaagataacattattggttacttcgttaataacaccaccaaagtggttgtgccaacggtttacgatcagtatctcacagtagctgaagaaatcgcgcagtggtctgctgacagaaactttgcgggtgcattaacttgtggcactaactttaaccaaacctgtgcgaatcagtttgttaacaacttcgctccaaaagtattccgacgcgcgctttctagcgatgaagctgcggcttacttggcgattgctaacggcagcgctaccaacggtgatgttaaagcgggtattcaacttgcgatggaaggcttgttctcttctccgcaatttgtatatagacacgagcttggtgaagccaatccaaataacaatgctatcgactctgacgcgtttgaattaacgtcttatgaaatggctacttggttgtcttacacttatgccggtaccacaccagatgcaattgctatgcaaaaagctgcaaacaatcagttgcgcacagacgcggaaattcgcgccgaagctcaacgtttgttagaaggtgctggtgcgaagcaaaaaatgggtgacttcgttgctagctggttaggtactgaccacattgcaaacgcacctaaagatgcttctgtatggcctggttttgatgcgttaattccgcatttacaaactgaaatacgcgaaatgttctcgtacgtaatgttagagccaactgaaagctttgcttcggtttacaacgctaactataccttcgtgaacggaccattggcgcaacactacggcattaacggtgtaagcggtaatgaattccaaaaagtaacaactaccgatcgcggtggcattttggcgaacggtgcgtttatggcgcgctggggtgaaagtgtagagtcttcaccaattcgtcgttctgtgcgcgtacgccgtcgtatgctttgtcaggatcaaccagatccccctggcaacgtaaacatcggtcgtgaaaacgctgcagacgaattccacgaggcgttggcagatcctactacgactaaccgtgagcgttatgagctgttaacatcaggtgaaacttgtgctacttgtcaccaagagtggattaaccctctcggctttggtatggaagatttcactgcggttggtacgcgtcgtgtgacggatctaaatggcaatactattgatgcaagcggtcaattgtacgcgccagaaaacctcaacgataaagacgtctttattaactttaacggtactcaaggtttaggtgcgttactgactaccttgccaagtgcgcagtcttgtttgccacaaaacttgttccgttattccgtgggcgttggtgtagaagggttggatgataatccagaaggcaacgagctagttcctgcagaacgggatggctatgcctgtgaagttaaaaacctgacgagcactatgttagagcaaagtccgcgagcaatgctggaaggcatgggttccatgcaagcggtacgttaccgcaaagcgtgggcgcgttaa

SEQ ID NO: 178 - protein, 933 aa, Microbulbifer degradans
MYPLPFNSKIVISLGAMTLALATQQAQALSCTVSADSWNSGYTANVTVVNDSSYSINSWDVTLGFNQPPSVSAGWNANVSTVGTTVMASNVGYNGNLSPGQSTSFGFQGAHNGNFELPSCAGGMTSSSSSSSSSSSSSSSSSSSSSSSSSSSSSSSSSSSSSSNSSSSSSSSSSSSTSSSSGSGGANTVTIELENLSGQNGFSPFSVQNDSSASGGQYIVWPNNGDQLLSGASDGQSGTLAVSFELSQTANVSFDIRASLANGNDDSFYYKLDSGVWSTQNNTSTSGFETLSPTTFNGVSAGVHTLYIQRREDGAKLDSLSLTASVGNIISSHANSSSSSSSSGSSSSSSSSSSSGGNELVIAINAGGGATSLDGVNFVADVHSLGGSTGSTTDSIAGATSSTLYQTERYGSYSYAVPVTNATYSLKLHFAEIYHTEAGARSFNLAVEGQQEMASVDLYSLSGHDGAYTYEVNDFPVDDGEVTISLESLTDNGTLSGFELSSSDGGEYVEPTPIPTPEPGEGGRYRVIHTTDMGADPDDEQSLVRQLVMANEYDLEGIITTTGCWKKSTSNTAYVDRILNAYSQAYPNLSKHAEGFPTPAYLDSINVMGQRGYGMGDVGSGKDSAGSNLIIAAVDKDDPRPVWATCWGGCNTIAQAVWKVQNTRSQAQLDAFISKLRVYDILGQDNAGTWLAKNFPNLIYIRARSVYSWQPSDSYLDNHIQSHGALGAVYPNRRYATEGDTPAFLHMANPGLNDPSVVSMGGWGGRFPSKQAGVRGMSCMSGEDAVYDTYYMYTENGESIKRWSTAIHNDFQARMDWAIESNYSAANHHPVPVVNNDANEAVMYLNASAGSTVSLDASGSSDPDGDSLNYSWSHYGEADSYSGSVSISNSSSASANVQIPSNAGGKDIHILLTLRDNGSPNLYAYRRVVINVQ

SEQ ID NO: 179 - protein, 108 aa, Microbulbifer degradans
MYWPPLALLSFCTLNGEKPFWPLKFSSSIVTVLAPPLPEEELVLELDELLLELEELEELEELEELEELEELEELEELEELEELEELEELEEDDEVIPPAQEGNSKLPL

SEQ ID NO: 180 - DNA, 2802 bp, Microbulbifer degradans
atgtatcccttgccatttaattcaaagatagttatttcgcttggtgcaatgacgctcgcgctggcgacgcagcaagctcaggcgcttagttgtacggtttcggccgacagctggaatagcggttatacggccaatgtaacagttgtcaacgatagtagttacagtattaatagttgggacgttacgcttggttttaatcagccgccaagcgtgagcgccggttggaatgcgaatgtgtctactgttggcaccacagtcatggccagcaacgtgggttacaatggaaacttgtcgcccgggcagtctacatcctttggttttcagggggctcacaacggcaattttgaattgccttcttgcgctggaggtatgacttcatcatcctcttctagttcttctagttcttctagttcttctagttcttctagttcttctagttcttctagttcttctagttcttctagttcttctagttcttctagttcttctaattcttctagctcgagcagcagctcgtcgagttctagtaccagctcttcttccggcagcgggggcgctaatacagtgactattgagctagagaatttgagcggccagaatggcttttcaccatttagcgtgcagaatgacagtagtgccagtggcggccagtacatcgtttggcccaataatggtgaccaactgctaagcggagcctccgatggccaatctggtactttggcagtgtcgtttgaattgtcgcaaacggcaaatgtgtccttcgatataagagcgagcttggcaaatggcaatgatgattcgttttattacaaacttgactctggtgtttggagtacccagaacaacacttctaccagcggttttgaaactctctcgccaactacctttaacggagtgtctgctggtgttcatactctttatattcagcgccgagaagatggagctaagctcgatagtctgagcctgactgcctctgtgggcaatattatcagcagccatgctaatagcagttctagttcttcttccagcggctcaagttcgtctagctcttcttccagttcaagtggtggtaatgagctagtaattgctataaacgctgggggcggtgccacatctctagatggtgtgaattttgtagctgatgttcattcattgggcggctccaccggttccaccaccgacagcatcgcaggcgctactagcagtactttgtatcaaacagagcgctacggcagctacagctacgctgttcccgtaactaatgccacttattcgttaaagctgcattttgctgagatttaccatactgaagcgggggcccgctcgtttaatcttgctgtggaaggtcaacaggagatggctagtgtagatctgtattcactgtcagggcacgatggtgcttatacctacgaggtgaatgatttcccggtggatgatggcgaggttacgatttcgcttgaatcacttaccgataacggcacgcttagtggtttcgagctttcctcctctgacggtggtgaatatgtggaaccaacacctatacctacgccagagccgggtgaaggcggtcgttaccgagtgattcacaccacggatatgggggcagacccagacgatgagcagtcgttggttcgccagttggtaatggccaacgagtatgacctagagggcattattacgacaacaggttgttggaaaaaatccaccagtaacacggcctatgttgacaggatcctcaacgcctacagccaggcatatcccaatttgagcaagcatgcggaaggattcccaactccggcgtatctggattccattaatgtgatggggcagcgtggctacggtatgggtgatgtcggctctggcaaagactctgccgggtccaacctgattattgctgcagtggataaagatgatccacgtcctgtatgggcaacttgttggggtggatgtaatactattgctcaggcagtgtggaaagtgcaaaacacgcgctcgcaagcgcaattggatgcttttatcagcaagttacgtgtatacgatattctcgggcaagacaatgcgggcacttggctggctaaaaactttccaaaccttatctacattcgcgcgcgatctgtttacagctggcaaccctctgatagttatctggataatcacattcagagtcacggtgcactgggtgctgtatacccaaatcgtcgatatgcaacagagggggatacaccagcatttctgcatatggctaatccgggattgaacgacccatcagtggtttccatggggggctggggtgggcgtttccctagcaaacaagctggtgtacgtggtatgtcgtgcatgagtggtgaagatgccgtctacgatacctactacatgtatactgagaatggcgaatccattaagcggtggagcactgcaattcacaacgactttcaggcacgtatggattgggccattgagagtaactattctgcagcgaaccaccacccagtacccgttgttaataatgatgctaacgaggcagtaatgtatctcaatgcgtctgcgggttcgacagtttcgctggatgctagcggctcgagtgacccggatggagatagccttaattattcgtggtctcactacggcgaagcggattcttacagtggttccgtgagcattagtaatagtagttcagccagcgccaatgttcagattccgtcgaatgctggtgggaaggatatccacattttgctaaccctgcgtgataacggttcccctaacctctatgcctaccgccgcgtggttattaacgtgcaataa

SEQ ID NO: 181 - protein, 584 aa, Microbulbifer degradans
MRCVLVKNYQIIKLKNYSHHVCWRKFMSTQGKPCLKKLWPALALAAAVASPNAFSACEYVVSNQWDSGYSATIKIHNDTNSTINGWNVNWQYSGDNRVTNLWNAAYVGSNPYSASNLSWNSTVGAGQTIEFGFQGAKNGGSAEVPVVTGDVCSGGGSSSGSSSSSSSSSSTGSSTSSSSSSSSSSSTGGSTSSSSSSSSTGGNGGAQQCNWYGEIRPLCNNQDSGWGWENQQSCIGRDTCSNQSGNGGIIGGSSSSSSSSSTGSSSSSSSSSSSSSSSSSSTSSSSSSSSSTSSSSSSSSSSSSSSSTSSSSSSSSSSSSSSSSSTSSSSSSSSSSSSSSSSSSSSSSSSSSSGGGVIFSADFESDSDSTQPAGWDNFIGWRQNGPNPNGSTFALVESGRAHSGNNAVHFSGGASPAMIARALPADLDTLYVRAWVYMTRQLGMNPGDNHETLIALRGSAGNANNEVRFGEIKGVIGTNEVPSDNIAPTMASWGGGPAYASDTWHCIEVAFLSQPAYDTVNAWVNDALVHTIDEGSDWNNGALEADWLSNKYVELAFGWHSFSGNDVDVWMDDIVVSTTPIGCD

SEQ ID NO: 182 - protein, 64 aa, Microbulbifer degradans
MEPPVELLEELLEELLVELPVELLDEELDDEPEELPPPLHTSPVTTGTSALPPFLAPWKPNSIV

SEQ ID NO: 183 - DNA, 1755 bp, Microbulbifer degradans
gtgcggtgtgtattagtaaaaaattatcaaataataaaattaaaaaattatagccatcatgtttgctggagaaagtttatgtcaacccaaggtaaaccttgtttaaaaaaattgtggccggcgttagcgcttgctgctgctgtagctagtccgaacgcattttctgcgtgtgagtatgttgtatccaatcaatgggattcagggtattcggcgactattaaaattcataacgatacaaattcaaccattaatggttggaatgtgaattggcaatatagcggcgataaccgcgtaaccaatttatggaatgcggcgtatgtaggtagtaacccatactctgcaagtaacctttcgtggaatagcaccgttggtgccggtcaaactatcgagtttggtttccagggggccaaaaacggcggcagtgccgaagtgcccgttgttacgggtgatgtgtgtagtggtggtggcagttcttctggttcatcatctagctcttcatcgagtagctctacaggtagttctacaagcagttcttcaagtagctcttcaagtagttccacaggcggttccacaagcagttcatcaagctcgtcttctaccggtggcaatggtggtgcacagcaatgcaattggtacggtgaaattcgcccactgtgtaacaatcaagatagcggctggggttgggaaaatcagcaaagctgtatcggtcgcgacacctgttccaaccaaagtggcaatggcggtataattggcggtagttcttctagctcgtccagttcttcaaccggttcatcgagcagctcttcgagttcttcgtcaagctcatccagctcttctagttcaacgtcaagctcatccagctcttctagttcaacgtcttcaagttcttcgtcgagttcatcatctagctcttcaagttctacaagtagctcgtcgtcttcgtctagctcatcgagtagttcttcaagcagttcgacgtctagcagtagttcttcatcttcgagctctagcagttcatctagctcttcaagcagttcttctagtagctcttcttcaagtggtggcggtgttatttttagcgcagacttcgaaagcgatagcgatagtacacagccagcaggttgggataattttattggctggcgtcaaaacgggccaaacccaaatggttcgacatttgcgttggtggaatcaggtcgcgcacacagtggtaacaacgctgtgcacttcagtggtggcgcaagcccagctatgattgctcgcgctttgcctgcagatttagatactttatatgtgcgtgcttgggtgtatatgactcgccaattgggtatgaaccccggtgataaccatgaaacgctcatcgccttgcgtggctctgctggcaatgcaaacaacgaagtgcgttttggtgaaattaaaggggtaattggtactaacgaagtaccgagcgataacattgcacctactatggcaagctggggtggtggccctgcctatgcatcagatacttggcattgtatcgaagtggcatttttatcgcagccagcgtacgacactgtaaatgcatgggttaacgacgcgcttgtacatactattgatgaaggctctgactggaacaatggtgccttagaggcggattggttaagtaataaatacgtagagctagccttcggctggcacagctttagcggcaacgatgtagatgtatggatggatgatatcgttgtatccacaaccccaatcggttgcgactaa

SEQ ID NO: 184 - protein, 788 aa, Microbulbifer degradans
MFTRITFMLINKARGRLAAAMLATAASAWGSTALAECSYQVTNNWGSGFTAAIRITNTQTSSINDWQVSWTYENNTLVNAWNANVSGNYTATNMGWNGSLTSGQSVEFGLQGTTTGGVVEIPLLTGNVCNSNTSSSSSSSTSSASSSSSSSGAAAVNLAGIANASTSYVSAWETLAAVNDGNTPANSNDKSNGAYGNWNNPNSIQWVQYDWPQNYTLSSTQIYWFDDNGGVLVPDVAYIEYWSNGTWVKVGDVPRQENTFNTLNLNNIVTNRLRVSISNTLQSTGILEWRVEGTEPSGSSSSSSSSSSSSSTSSSSGGPEQCDAYVWPEYEPNLNYDFRQDYADINPEEFEVFLGCDPSQVAGVKTSGWYAFIWGHNRNPAITDEDIDRVLANLNEDMAYARGEMGWPPDKLPQEGYYSNVYLYGSGLCTDNAANTERGGWQSSIAGYPMVLLSYYPVITPSERGGITHEAIHTIMASMGNKAAWFNEGGNTWLQMNMEASRVGDYGVGFLDGAPFLAPHMPIENYSGWLQDGSFGGPNAEGVHRELNGQQIATWRDYLGGHQYNSVFSHFLAQYVSSGANAWIWKNGPYNHILASLAAGLGDDQTRHLIMQYRARQAMVDFGPWTNGFKQPINNNWQRTIGAEETAAGKWMEPEPHQLTFYAATSQEGNTLIPAQNTLPGWSGANQIPLQVTGNKVRVDFEPFGNNMRLQLAYRAQDGSAVYSQPIESGEACLTLEKTPKNGVVVAIVSNTDYTYAGDETRKQKYDYRVHIQEGVSGTASLYSKHYE

SEQ ID NO: 185 - DNA, 2367 bp, Microbulbifer degradans
atgtttacgaggattacctttatgttaattaacaaagcgagaggtcgcttagctgcagcaatgttagccacagcagcctcagcttggggtagcacggctctagccgagtgcagctatcaagtcacaaataattggggcagcggatttactgccgccattcgcatcactaatacccaaacgagtagtattaatgactggcaagttagctggacgtacgaaaataatacacttgtaaatgcttggaacgcgaatgttagcggcaattacaccgctacaaacatgggctggaatggctcacttacctcgggccaatctgtcgagtttggcctgcaaggcaccacaactggcggtgtggttgaaatcccccttttaaccggtaatgtgtgcaactcaaatacaagtagtagctcttctagtagtacaagttcagcctcaagttcaagttcgagttccggcgctgccgcagtaaatctcgctggtatagccaatgcgagcacttcctatgtttctgcatgggaaacattggcagcagtgaatgatggtaacaccccggccaattccaacgacaagtccaacggagcttacggcaactggaacaatccaaattcgatacagtgggtacagtacgattggccacaaaactatacgttatcctcaacgcaaatatattggtttgatgataatggcggcgtactggtacccgatgttgcttacattgaatattggagcaatggcacatgggtaaaagtaggtgatgtaccgcggcaagaaaatacatttaacacgctaaatttaaacaatattgttacaaaccgcctacgtgtttctataagcaacacattgcaatctacaggcatactggagtggcgcgtagagggaacagagccaagcggcagctcatctagcagcagctcaagctcatcatccagctcaacgtctagtagtagtggcggaccagaacagtgtgatgcgtatgtgtggcccgaatacgagccgaatttaaattacgactttagacaggactacgcagatataaaccccgaagaatttgaggtatttttaggttgcgacccaagccaagttgcaggtgttaaaacttctggctggtacgcgtttatttgggggcataatcgcaaccccgcaattaccgatgaagatatagatagagtattggccaatttaaatgaagatatggcatacgctcgcggcgaaatgggctggccacccgataagcttcctcaggaaggctactacagcaatgtgtatttgtacggctctggtttatgtaccgataacgcagccaataccgagcgaggtggctggcaaagtagcattgccggctaccccatggtactgctttcgtattacccagtaataacacctagcgagcgcggtggtataacccacgaagctatccacactattatggcttcgatgggaaacaaagctgcatggtttaacgaaggcggcaacacttggctacaaatgaatatggaggcatctcgcgttggggattatggcgttggctttttagatggtgccccctttttagcgccgcacatgccaatcgaaaattacagtggttggctacaagatggctccttcggtgggccgaatgctgaaggcgtacaccgggaattaaatggtcagcaaatagcaacttggcgagattacttaggcggccatcaatacaactctgtgttttctcactttttagcgcaatatgtttctagcggtgcaaatgcgtggatatggaaaaacgggccatataaccatattctcgcctcgctagcagcgggcttgggcgacgaccaaactcgccacttaattatgcaataccgcgcacggcaagcaatggttgattttggcccttggacgaatggatttaaacaaccaatcaataacaattggcaacgcaccattggtgcagaagaaaccgctgctggcaaatggatggagcctgaaccccatcaattaacgttttatgctgcaacaagccaggaaggtaatactttgataccagcacaaaatacattgccgggctggtctggtgccaatcaaataccattacaagtaaccggcaacaaagtgcgtgttgattttgaaccattcggcaacaatatgcgcttgcaattagcctatcgcgcacaagacggttcagcggtatacagccagcctatagaaagtggcgaagcgtgcttaacactagaaaaaacacccaaaaatggcgtagtggtggcaattgtatccaacaccgattacacctacgcaggggatgaaactcgcaaacaaaaatacgattacagagtgcatattcaagaaggcgtaagcggtacggcatcactttatagcaagcactatgaatag

SEQ ID NO: 186 - protein, 787 aa, Microbulbifer degradans
MLRKLNFILAPLGMVLGVNTYADVSCAVSGSVWNNGYVANVAVTNAGESLQEGWSVALLFDNTPTINNSWSAELAVDGNVLTASNVAWNANLAAGQSAHFGFVGSYSGEFELPECFVGALDDDTALEDYLKQGVHNHLNLRIANSASGSSSSSSSSGASSSSSSSSASSASSTSSGSPVAEPDTQPDDITNTQEDGVDEADIIESDGNHFFVVRSSLYFTGTSSSTSGSSSSSASSSGSGGYGDYTQGVLIEAYSKDSAAGTTQHVGQVTLPYEENYLHVSGAYFRKTPQGNRLAIVSNTRESQPYYWSYGYGYYPYYQISNKVAISVANIDTPELMDEAERITFDGDLVSSRRIGSKLYIASRYSPNLNRLGFDFSSSASNEENAQRLDEAPLADLLPHVYDENGVGTPLVTAADCTVPEWPESVDVYAGSLLVITQIDLDNNLAISSRCLPASATEIYSSADAIYAFSNAFYAGVKVHKFTLKNDAQESEISYKGSVKLPGFIACSNQSYCFGEQDGALRVLYRVSNYSDATPYRIAVIKQSPSSAEGLDIIATLPNAERPASIGKPGEIVYAMRSFGDHAYVVTFDRIDPLYAIDFSNPADPYIAGELEVTGVSDYLHPVGENLLLGVGRDAIFDEARNLTWFQGVKVELFDVSDPTNLRSLGSEVIGKRESSTTLSFDARGIAFSHDENGIRFAIPVKMHDKPIGPANTDALNQYYSWTHTGLYVYQIETQPNTDASLSRLGILKTDIGEASVRYDRGVIDGDAVYYLHNYHMFSSLINYLAQ

SEQ ID NO: 187 - DNA, 2364 bp, Microbulbifer degradans
atgttacggaaattaaattttattttagcgccgcttggtatggtgttaggcgttaacacctatgcggatgtgtcgtgcgctgtttctggcagcgtgtggaacaatggctatgtagctaatgttgcagttactaacgcgggtgaatctctgcaagagggttggagtgttgctttgttgttcgataacactccaactataaacaatagttggagtgcggagcttgctgtagacggtaatgtgctaaccgcgagtaatgtggcttggaacgctaatttggcagcggggcaatctgctcattttggttttgttggctcatattcaggtgagtttgaattgcctgaatgtttcgttggcgcactagatgatgacactgcactcgaagattatttaaaacagggcgtgcataatcatttaaatttacgcattgcaaattcggcgtctggttcatctagctcttcgagctcttccggtgcgtccagttcttccagttcatccagtgcttctagcgcatcgagtacatcttctggttcgcccgtggccgagcccgatactcagcctgatgatattaccaatacccaagaagatggcgtggatgaggcggatataattgaatccgacggtaaccacttctttgtggtgcgttcttctttatattttaccggcactagctcatcaacctctggctctagttctagttcggcttcatctagcggttcaggtgggtatggcgattacacacagggagtgttgattgaagcctacagtaaagattcagcagccggaacaactcaacatgtggggcaggtgacgttgccctatgaagaaaattatcttcacgtttctggtgcttactttcgcaaaacaccgcaaggcaatagattagctattgtaagtaacaccagagaatcacagccttattattggagctatgggtatggttattacccctattatcaaatttctaataaggtagctatttctgttgctaatattgatacccctgaattaatggacgaggcagagcgaattacttttgatggtgatttagtatcgagcagacgtattggtagcaaattatatattgccagccgttatagcccgaacctaaatcgtttagggtttgatttttctagcagcgcgagcaatgaggaaaatgcacagcgtttagatgaagcgccccttgcggatttattgccacatgtttacgacgaaaatggcgtaggtacgcctttggttactgctgctgactgcaccgtaccggagtggccagaaagcgtggatgtatatgccgggtcactgttggttattactcaaattgacttggataataacttagcaattagctcgcgttgtttacctgcttcggcaacagaaatatacagttctgcggatgcaatttatgctttctccaatgcattttatgctggggtaaaagtgcataaattcacattaaaaaatgatgcccaagaaagtgaaattagctataagggtagtgttaagttgccgggttttatagcttgcagtaatcaatcttattgctttggcgagcaagacggggcattgcgcgttttgtatagagtgtccaattacagtgatgctactccctatcgtattgcggtaattaagcaatcgccaagctctgcagaaggtttagacattatagctaccttgccaaatgctgaacgcccagcctctattggtaagccgggcgagattgtttatgccatgcgtagttttggtgatcacgcttacgtcgttactttcgatagaattgacccgttatatgctattgatttctctaacccagcagacccttacattgccggtgagcttgaggttactggtgtgtctgattacttacatccagtgggggagaatttattgttgggcgtgggccgagatgcaatattcgacgaagcgcgcaatttaacttggtttcagggtgttaaagtggagctgtttgatgtgagtgaccctacaaacctgcgcagcttaggcagtgaagtaataggtaagcgcgagtcgtcaacgacacttagttttgatgcccgtggtattgcatttagccatgatgaaaacggtattcgttttgctattcctgtgaaaatgcatgataagccaattggaccggcaaataccgatgcgttaaaccaatattatagttggacccatacggggttgtatgtttaccaaatagaaacgcagccaaacaccgatgctagtttgtctcgcttaggtatactaaaaactgatatcggcgaggccagtgtgcgctatgatcgtggcgtaattgatggtgatgctgtttactatttgcataattaccacatgttttcgagcttaatcaattatttggcgcaatag

SEQ ID NO: 188 - protein, 681 aa, Microbulbifer degradans
MRISTAITQFLIVIATLILAACSGSGGGANSGGSNPGASSSSSSSSSSSNSSSSSTSSSSSSGGSSGAAVSLPSTIAAMDFVAAYDTDNANSGDCGNGPVDMQTSTDTQGAACTVGWTKAGEWLAYDVSVAVTQKMDIVFRVATNQNSRALKVQLNNKTLGVLNVSGTAFDEWQTVSLKDIEIPAGTHQLKLVWMTGAINVNTLSFTAHSAYGQTTNLWGSNGAEHDPSGVLSDWSYAGYHWGEEEPPVKSPTINVVTDHGAIADDDSDDSAAFIAALTAANNGDVVYVPEGRFILTQVLSIPNGVVLQGAGSELTTLYIPTNLNEATGIDPSFTGGFIEMKGSSSDGSKLSTITAAAARGSNQITVESVAGLTVGDWVQIQQTDVNGNFLLEALYAGYTAGLSDYSNLVNDAELEFFSRITNISGNTLTLERPLPITVSPNYMAELHSVSVAYGEVGFEGMTLEFPETTYPGHFNELGYNGIDMRAQHSWVRDVVVKNIDYGINLRGSHFVSILDFTVINTNDRSGHHGISVGSSTDCLIRGFDIQAELVHDLTVEWYAYGNVFTQGRGKNITLDHHRAAAYANLFTQIDLGEATRAWKTGGRSDRGYKTAVYSTFWNMTAEQAIDWPANDFGPRMVFMGLTMDGSHSSVLDWVVEDISADDIYPPNLWLSQREKRLGRQ

SEQ ID NO: 189 - protein, 66 aa, Microbulbifer degradans
MLGSDTAAPDEPPLEDDELVLLELLLDEEDEELELELAPGLEPPEFAPPPEPLQAARISVAITIRN

SEQ ID NO: 190 - DNA, 2046 bp, Microbulbifer degradans
atgcgtatttctactgctatcactcaattcctaattgtaattgctacacttattctagctgcctgcagtggctcgggcggaggggcgaattctggtggctctaatcctggtgctagttctagctccagttcttcgtcttcttcatctaatagcagttcgagtagcactagttcgtcgtcctctagtggtggttcatccggtgccgcggtatcgctcccaagcactattgccgcaatggattttgtcgcagcttacgatacagacaacgcaaattcaggtgattgtggtaatggccctgtcgatatgcaaacgtcaaccgatacgcaaggtgcggcctgcacggtaggttggacaaaagctggcgagtggttggcttatgatgtgagtgttgctgttacccaaaaaatggatattgtgtttcgtgttgctactaaccaaaactcacgtgccttaaaagtacagctaaataacaaaacattgggtgtgttaaatgtttctggtacagcgtttgatgaatggcaaactgtatcgctaaaagacatagaaattcctgcaggcacgcatcaattaaaactcgtgtggatgaccggggcaataaacgtcaatacccttagttttaccgcgcacagcgcctacggccaaactaccaatttgtggggcagtaacggtgccgaacacgacccgagcggcgtgttatctgattggtcttatgctggttatcactggggtgaagaagagccgccggtaaaatcgccaaccattaatgtggttaccgatcacggtgcgatagccgatgacgatagcgacgatagcgctgcgtttattgctgcattaaccgcagcaaataatggtgatgtagtttacgtacccgaggggcgttttattcttacgcaggtgctaagcataccgaatggtgttgtgttgcagggcgcaggcagcgaattaactactttatatattcccaccaacttaaatgaagcaacgggtatagatccatcttttactggtgggtttattgaaatgaaaggttcgtcgagtgacggcagtaaactttctactattactgcagcggcggcacgaggcagtaatcaaataacagtagaaagtgttgcaggtttaaccgtaggcgattgggtgcaaatacaacaaaccgatgtgaacggtaactttttattagaggccttgtatgcagggtacaccgcaggcttaagtgattacagtaatttggttaacgatgcagagttagagtttttcagccgcataacaaatattagtggcaacacacttaccctagagcgaccgctacccattaccgtaagccctaactatatggcggaattacacagcgtatcggttgcctacggcgaggtgggtttcgaaggaatgactttagagtttccagaaacaacctacccaggtcacttcaatgagttagggtacaacggcatagatatgcgcgctcagcactcttgggtgcgagatgttgtagtaaaaaatatagattatggtattaatttaagaggctcgcactttgtaagcattttagattttactgtaattaacacaaatgatcgcagtggccaccacgggataagtgtggggtcgtccaccgattgtttaattcgcggtttcgatattcaagccgaactagtccacgatttaactgttgaatggtatgcgtatggcaatgtatttacgcaagggcgaggcaaaaatattaccctcgatcatcaccgcgcagcagcctacgccaacttatttacccaaattgatttaggtgaagcaacacgcgcatggaaaacaggtggccgaagcgatcgcggatacaaaaccgcggtatacagtacgttttggaacatgaccgccgaacaggcgatcgattggcccgccaatgatttcggcccacgtatggtgtttatggggttaaccatggacggcagtcacagctctgttttagattgggtggtagaagatatttctgcagatgatatatatccaccaaacctttggttgtcgcaaagagaaaaaagattggggcggcagtag

SEQ ID NO: 191 - protein, 654 aa, Microbulbifer degradans
MRFQYALCTDSGGTIKNNQSWVSIMLRIHLAMPNMAFSLLQHYLLNTFSGVSIWVLCGLLMGAYVNAATQEINGNQLQVTCQSETFCDIHYRLNNGRELNIAMASLGNGEYAHTISNLISGDVIVYYLTYQQNGLAYDSERLTHIYGGASSSAGADPYLGFRAPIPGTILAVNYDTGGEGIAFHDATIGNSGGQYRDESVDIESASIGGFNVGWVASGEWLQYSVDVARAGSFDIVAQIASPNSGGSLHYEITGATNVQSDAVQFANTGGWQVWAHTAAAKVQLNAGAHTIRLVFESAGFNIHSLLVSEASSSFGKVEAESFDSMSGVVSEATSVGYFDRGDWMKYSAVSFGNLAKSITLSVAGEYNNGIAELRLDSVSGPVIGTYSMESTGGWASFKPKSFNIVHTLGVHDLYIVGKNGSGIFNLDYFQLSADVVEETNPATAVKAMSLNIYGWATMPQNADKYAALIRSRGVDVVGIQEGVEDWLIGPGFPTNYSKADALGAALGACWQQRYQIFINICEGNSFVSNRRFDMTDGPNATRTGESARINKNGFEYAVLTVHWDHQSGAAKVANAHETAAEVNYYGALPTVVVGDFNTGCTSHEVNTLMHEAGMVLIGNAGIDCILAKRFNGTAQTFDAAPSDHPGLDASLSTN

SEQ ID NO: 192 - DNA, 1965 bp, Microbulbifer degradans
gtgcgttttcagtatgcgttgtgcacagacagtggcggtacaattaaaaataatcaaagttgggtatctattatgttgcgaattcatctagccatgccaaatatggccttttcactattacagcactatcttttaaacacattttctggggtatccatatgggtactttgtggtttattgatgggggcatacgttaatgccgccacacaagagatcaacggcaaccagttacaagtgacatgccaaagcgaaaccttttgcgatattcattatcgtttgaataatggcagagaattaaatatagcgatggcgtcgttaggtaatggtgagtacgcacatacgatttctaatcttatttctggcgatgtgattgtttactaccttacgtaccaacaaaacggtttggcctatgactctgagcgcctgacgcacatatatgggggggctagctccagcgctggcgcagatccctatttggggtttagagcacctattccagggactattctcgctgtgaactacgatactggaggcgaaggcatcgcttttcatgatgccacaataggaaactctggtggtcaataccgcgacgaaagtgtggatatagagagcgcttcgattggtggctttaatgtggggtgggttgcttccggcgagtggctgcaatactccgtggatgtggcgagagctggcagtttcgatattgttgcgcaaatcgcctctcctaattctgggggcagccttcattatgaaattacaggggcaaccaatgttcaatctgacgcggtgcaatttgcgaatacaggtggttggcaggtttgggcacacacagcggctgcgaaggtacagctgaatgcaggtgctcataccattcggttagtgtttgaatcagcagggtttaatattcattctctgctggtaagcgaagcgagctctagtttcgggaaagttgaggcagaaagttttgattccatgagtggcgtagtgtcggaggcgacaagcgtaggctattttgatcgcggtgattggatgaaatacagcgcggtcagctttggtaatcttgccaagagcataacgttatccgtcgctggtgaatacaataatggtatagcagaacttagattagacagtgtcagtgggccggtgattggcacctactcaatggaatcgacaggtggttgggctagttttaagccaaagagttttaatatcgttcataccttgggagtgcatgatctttatattgttggtaaaaatggcagtggcatttttaatttagactattttcaattatctgcagatgtcgtagaagagaccaaccctgctacagcggtaaaagcgatgtcgctgaatatatatgggtgggcaacaatgcctcaaaatgctgataagtatgcagcgcttattcgttctcggggtgttgatgttgtgggtattcaagagggggtagaagattggcttattgggccgggttttcccacaaattactccaaagcagatgctcttggtgctgccttaggagcttgttggcagcagcgctatcaaatttttattaatatttgtgaaggaaatagcttcgtgtcgaatcgtcgattcgacatgaccgatgggcctaatgcaacgcgcacaggcgagtctgcacgaataaacaaaaatgggttcgaatacgcagtcttaacggtgcactgggatcaccaaagtggcgcagctaaagttgctaatgcacatgaaacagccgccgaggttaattactacggtgcattgcctaccgttgttgtgggcgatttcaacactggctgtacaagccatgaagtaaatacacttatgcatgaagctggaatggttttgattggtaacgccggcattgattgcattttagctaagcgattcaatggtacggcacaaacatttgatgctgcaccatctgatcaccctggcttggatgcgtcactcagtaccaactag

SEQ ID NO: 193 - protein, 550 aa, Microbulbifer degradans
MKSCCIKFFTTLCTAVYVLGCGALAHAQTGPAGYNYAAAENETVYLNGTTNVAYGANGSFYYAYNQTGSVNCSNQTFGDPIFGVRKACYTQQVASNNPPSVSFASPTGNLTVDEGYALSVTVNASDSDGSIASVELFINNQLVRQELYAPYEWGAAAEPDELNGLPVGTHTIKAVATDNDGDTKQASFKLTVRGAAVDVPGLVQAEDYTGFYDTTNGNTGGAYRNDNVDVETTSDSNGGYDVGWFAANEWLEYPINVTEAGNYVLEARVASAVGGGMFTAEINGNNSSTFSIGNTGGWQNWQTLNNNIGNLSTGKKTLRIQAQSGNFNLNWLRLKRATTSVCTLNTPAENIPTPFNLFTVIDTDLNRYEFCKASKWFEESNGKQVFKLFTGDNLADNVPGARVHARTEAGQGLKFKAGSTWHTFEARMKPSKKLDYTYTIAQLFAGCCGPQLRIEVKSNGRIHMGSRGNGNIRISDDQDYANGSRSFKIKIRTNGDQFEVYFNSSKKFSGRTDEAKNGNTSALYHFRWGVYSNEVMSEDLSNTVTEIIRN

SEQ ID NO: 194 - DNA, 1653 bp, Microbulbifer degradans
atgaaatcatgttgtatcaagttttttaccacactctgtactgctgtttatgtactgggttgtggcgcgttagcgcatgcgcaaactggcccggcgggttataactacgctgctgccgaaaacgaaacggtgtatttaaacggaaccaccaacgttgcctacggcgcgaatggctcgttttattacgcttacaatcaaaccggttcggttaattgctctaatcaaacctttggcgaccctatttttggggtgcgcaaagcgtgttacacccagcaagtggcgagcaataacccgccgtcggtttcgtttgctagcccaacgggcaacctaacagtcgacgaaggttatgctctttctgtaaccgtgaacgccagcgatagcgacggcagcattgccagtgtagagctgtttattaacaaccaattagtacgacaagagctttacgcaccttacgagtggggcgcagctgctgagccagacgaattaaatggcctacccgttggtacacacacaataaaagcggtagccaccgataacgacggcgacaccaaacaagctagctttaagctaacggtacgcggtgcggcggtagatgttcctggcttggtacaagcggaggattacacaggcttttacgacacaaccaatggcaacactggtggtgcgtatcgcaacgacaatgtagacgtagaaaccacaagcgatagtaacggtggttacgacgtaggttggtttgcggcaaacgaatggctggaataccccattaacgttaccgaagcgggcaattatgtattagaagcacgcgtcgcatctgctgtaggcggtggtatgtttaccgcagaaataaatggcaacaacagcagtacatttagcataggcaataccggcggctggcaaaattggcaaaccctgaataacaatattggcaatttaagcaccggtaaaaaaacgttacgcattcaagcgcaaagcggaaactttaatttaaactggctgcgcctcaagcgtgccacaacctctgtgtgcacacttaatactcctgccgaaaacattccaacgccatttaatttatttaccgttatcgatacagatttaaaccgctacgaattctgtaaagcgtctaaatggtttgaggaatctaacggtaaacaagtgtttaaattatttaccggcgacaacctagcagataacgtacctggcgcccgcgtacatgctcgcacagaagctggccaagggcttaagtttaaagcaggctccacatggcacacctttgaagccagaatgaaacccagcaaaaagttagactacacttacaccattgctcaattgtttgccggctgttgcgggccgcagttgcgcattgaagtaaaatctaacggacgcatccacatggggtcgcgcggtaacggcaatattcgtattagtgacgaccaagattacgccaacggctctagatcgttcaaaattaaaattcgcaccaatggcgatcagttcgaagtgtattttaacagcagcaaaaagttcagcggccgcacagacgaagccaagaacggcaataccagtgcgctttaccacttccgctggggtgtatattccaacgaagtaatgagcgaagatttatctaacactgttacagaaattattcgaaattaa

SEQ ID NO: 195 - protein, 500 aa, Microbulbifer degradans
MFASNLEDPTYYIKYKGVYMNTNRKQVNQNLIALLGLMLLMLFTPHGYAQDQCNTTLECKILHGDTATDCKNSRSDNSICMCGSTECAVDNPQPEPSNSAAVPGLIQAEDFTDYYDVTAANHGGAYRSTGVDIQVTTDTNGGYNVGWIAANEWLEYNINVLQAGNYTANIRVASNNGVGMYSLAVDGVTVSGTNTVNGTGGWQVWITQTANLGYLTQGEHTLRIAVQAGNFNINWLELLLAGTQQPDMLGVFNKSRDLLLANFDSRPDPDDIHSVAALATMLKDSRFSNVQYHAVSGAYGIQGGDYIEATHLFNLAFGAGNWSNAHTNRDVALTTVYNKVAATLTNGGDIWVQEAGQSDFSADLVRRIKQQLPAINTQTRIHIVQHSNWNQDKTTPADLTYVKNQTDYKKIADGNSTGNGTPGFNSSSSANWNRALNHAQVGAIWQEAKRIADNAIANHQGWQNPNIRDGGMDFSDAVEDCWIFGFNSLTNINSFFDEFL

SEQ ID NO: 196 - DNA, 1503 bp, Microbulbifer degradans
atgtttgctagcaacctcgaagaccctacttactatataaaatataaaggtgtttacatgaatactaataggaaacaagtcaaccaaaacctcatcgcgctattgggcttaatgttgctaatgctatttacacctcatggctatgcgcaagaccaatgcaacaccacgcttgagtgcaaaatactccacggcgatacagccacggattgtaaaaatagtcgctcagataacagtatttgcatgtgtggaagtactgaatgtgcagtagataatccacaacccgaacctagcaattccgccgcagtaccgggcctaatacaagcagaagactttaccgattactacgatgtaacggcggctaatcacggcggcgcttaccgctccacaggcgtagacattcaagttaccacagacaccaatggcgggtacaacgtaggctggatagccgctaatgaatggctagagtacaacataaacgtactgcaagctggtaactacaccgcgaatattcgtgttgcatctaataatggtgttggcatgtatagcttggcggtagatggtgtaacggtaagtggcaccaacaccgttaatggcacgggtggctggcaagtttggattacccaaaccgcaaaccttggctacttaacccaaggcgagcatacgttgcgtatagcagtacaggctggcaattttaatattaactggttagagctgctgctagcgggtactcagcaaccagatatgcttggtgtatttaataaaagccgcgacctgttgttagcaaatttcgatagccgcccagacccagacgatattcattcagtagcggccctggcaacaatgctaaaagattcccgttttagcaatgtgcaataccacgcagtatcgggtgcttacggtatacaaggtggtgattacattgaagctacacatttgtttaacttagcctttggtgccggtaattggtccaacgcgcacaccaatagagatgtggcgcttacaactgtttacaacaaagttgccgcaacgttaaccaatggtggtgatatttgggttcaagaggccggtcaatccgactttagcgccgatttggtacgcagaatcaaacaacagttacccgctattaatacgcaaacgcgaattcatatagtgcagcatagtaactggaaccaagacaaaaccactccagccgatttaacctatgtaaaaaaccaaaccgactacaaaaaaattgctgatggcaattccacaggcaacggcacgcctgggtttaactcatccagcagcgccaactggaaccgcgcactaaaccacgcgcaagtaggcgcaatttggcaagaagcaaaacgcatagccgacaatgccatcgccaaccaccaaggctggcaaaaccccaatattcgagacggcggtatggacttctcggatgcagtcgaagactgctggatattcggcttcaactcactcacaaatataaacagcttttttgatgagtttttatag

SEQ ID NO: 197 - protein, 473 aa, Microbulbifer degradans
MQLIQLLKTMGISRLCIFLFGAVLASTMLAGCGGSSSSEKSSGQVVTEPESEPESEPESEPESEPESEPESEPESEPDPAPDTAQDMRSEKRGLAYGYHSENDLKAMQGKVKWWYNWDTQADANVKENYASYGYDFVPMAWDENFNEEALRSFLDNHPDVKYLLGWNEPNFMEQANLTPAEAAAHWPVLEAIAQDYNLKLVAPAVNYSPGNVDIPGTDDDYDPWLYLDAFFEACEGCQVDYIAVHCYMKYESAFSWYVGEFERYNKPIWVTEWAGWDDGGPANMGEQMNFLSDTVRWMESNDNIYRYSWFLGRSSEGYDQFPYLDVLLADGELTPLGSVYTSIPSNDFRYKIPARIEAEGAHSLTGFKHLATTDTTGLAKLIAASNEVAEYKLNVEEGGDYTLALRLASSANSDIAIRVDGLLVYTFEDINTGGVEAWMTFSSTPISLTAGDHILRVESKSSRFGFNWLELTN

SEQ ID NO: 198 - DNA, 1422 bp, Microbulbifer degradans
atgcagttaattcagctactaaagacgatgggtattagtcggctatgtatttttttatttggtgccgtactcgctagcacaatgctagctggttgcggtggttcttcaagttcagaaaagtcctcaggccaagtggtgactgagcccgaatctgaaccagagtcagaaccagagtcagaaccagagtcggagccagaatctgaaccagagtcggagccagaatccgagccggacccagcgcccgacacagcgcaagatatgcgcagcgaaaaacgcggcttagcctatggctaccacagtgaaaacgacctcaaagctatgcagggtaaagtgaagtggtggtacaactgggatacccaagcggacgcgaacgtaaaagagaattacgccagttatggctacgattttgttcctatggcgtgggacgaaaactttaacgaagaagcgctgcgcagctttttagataatcaccccgatgtgaaatacctgctgggctggaatgaaccaaacttcatggaacaggccaacctcacaccagcggaagccgcagcccattggcccgtgctagaggccatcgcgcaggattacaacctaaaattagtcgcccctgcggtgaactacagccccggtaatgttgatattccaggtaccgatgatgattacgacccttggctatacctcgatgccttctttgaagcgtgtgaaggttgccaagtagattacattgccgtgcattgctatatgaaatacgaaagcgctttcagttggtatgtgggtgaatttgagcgctacaacaaacctatttgggtaaccgagtgggcagggtgggacgatggcggcccagcgaatatgggtgagcaaatgaacttcttgtccgatactgtgcgctggatggagagcaacgataatatatatcgctattcttggtttttggggcgcagtagtgaaggctacgatcagttcccatacctagatgttttactggccgatggcgaactaacaccgttgggtagtgtgtatacctctattccgtccaacgattttcgctacaaaatacccgcgcgtattgaggccgaaggcgcccatagcttaacgggcttcaaacacttagccacaaccgatactacaggtttagctaagttaatagccgcgtctaacgaagtagcagagtacaaattaaacgtggaagaggggggcgattacaccttagctttacgtttggcttcatctgcaaacagtgatattgccatccgtgtggatggcttattggtgtacaccttcgaagatattaataccggcggtgttgaggcgtggatgacctttagctcaacccctattagtttaaccgcgggtgatcacatattacgtgtagagtctaaatcgtcgcgttttggctttaattggttagagcttactaattag

SEQ ID NO: 199 - protein, 465 aa, Microbulbifer degradans
MKLLSITHTLKRAIASAVFVASAATASIANAVTVDILVLYDNYSANYFGGDPQTAMNGWANDMNSALKASQIDMKFRIVGVRHHEEDGAGMGDVLGNLRVDGGAIALRDQLGADMVSQLHEKGACGVGYVAVDKNYTWNVTHPGCGPMVMLHEFGHNMGVTHSRKQGDQGGTRYRYGVGYGVQDVFVDIMAYEGVFNTSRVNVFSNPNLNCRGLPCGKPVGDSEEAHASLAIHNVRNELANFRNTVNSGGPVRLFEHCYYTGYTVGLGEGSYRLADLMNRGLVNDDLSSLQVDAGYRVEMFQHDNFTGNVVTRTGSDDCLVDEGMNDDISSLRITRVSGGFSQTIQAENFFANNGVQLENTTDSGGGQNVGWIDANDWMAFSNITIPTTGNYRIEYRVAGFGGTLSLDLNGGAIVLGQINLPNTNGWQNWQTASHTVHINAGTYNFGIFANAPGWNINWFRIVQL

SEQ ID NO: 200 - DNA, 1398 bp, Microbulbifer degradans
atgaaattactctcaatcactcacacactaaagcgggcaattgcgagcgcagtttttgtcgcgtccgctgctaccgcctctatagccaatgcagtaacggtagatattcttgtgctttacgataattattcggcaaattattttggcggcgacccgcagacggccatgaacggttgggctaacgatatgaactctgcgttaaaagccagccaaattgatatgaagttccgcattgttggtgtgcgtcatcacgaagaagatggcgcgggcatgggcgacgtacttggtaatttgcgcgttgacggtggcgcaatagccctgcgcgatcaacttggtgcagatatggtgtcacaactccacgaaaagggtgcctgtggcgtggggtatgttgccgtagataaaaattacacatggaacgttactcacccaggctgcgggccaatggtaatgctgcatgaatttggccataacatgggggttactcactcgcgtaaacagggtgatcaaggtggtacccgctatcgctatggcgtaggttatggtgtgcaggatgttttcgtcgatatcatggcttacgaaggcgtttttaacaccagccgcgttaatgtattttctaaccctaacctcaattgcagaggccttccgtgtggtaaacccgttggcgattccgaagaagcccacgcttcactcgctattcacaatgtgcgtaacgaacttgccaattttcgcaataccgtaaattctggtggaccggttcgattgtttgaacactgttattacacgggttatacagttggcttaggcgaaggtagctatcgcttagccgatttgatgaaccgcggtttggtaaacgacgatttgtcatcgttgcaagttgatgcaggctatagagtggaaatgtttcaacacgacaactttaccggcaatgttgtaacgcgcaccggcagcgacgattgtttagtcgatgaaggcatgaacgacgatataagttcactgcgtataacacgagtaagtggcgggtttagtcaaactatccaagcagagaattttttcgctaacaacggcgtgcaactagagaatacaaccgatagcggtggcggccaaaacgtaggttggattgatgctaacgattggatggctttcagcaacattaccattccaaccaccggtaactaccgtatcgaataccgcgttgcaggttttggtggcacgctttcgctcgacttaaatggcggcgctatagtgctaggccaaattaatttacccaataccaatggctggcagaattggcaaaccgcatcgcacactgtacacattaatgctggcacttataatttcggtatttttgctaacgcacccggctggaatatcaattggttccgtatagtacagctttaa

SEQ ID NO: 201 - protein, 1024 aa, Microbulbifer degradans
MKKPPSRYSTLAITLCMSLSQAAIAKDIYVAPTGDDAGAGSFSSPYQTLAKAAQTAQAGDVVYLREGTYQETLRPANSGTASHPIVFQSYQNEKVIISAMEALSGWQQDTSNIYKTTVNWDLGQENFVMHKSTALDLARWPNNTDADPFTLNSKRNTGGSGPEVGQGAYIEYAAGLPNINWTGGTVFYYGDKPGGGWLAWRETIVSHTQTRINIDLSKKNPAWVRTAHDPASGGEFYLMGVKGALDYQNEWYFDSNTRELFVQLPNGARPQNGDIQFRKRLQTINLANRSHIHIKNIAVFGGAIEITNNANSNLLSGVSSFYGNATLGVHTGFSAPSYSVKIQGSDNRIENSEIAYGSGTGIYDSGTRSQIVNNYIHDFNTLGDYNAPVNARGGSNTLVKNNRISRGGRDTIQAFNRDSEWSYNDVSHSNLIADDCGLFYTVGGPHNVEIHHNWFHDAYSHGNKNKAAGIYLDNDARGFKVHHNVVWNTEWTGIQINWNGTDIDVFNNTLWNNSAAMGAWHKAGTAFSDVRVWNNLSNSNKWEEQANKQNNLTGTGDPFVNSQAGDFRLKANTAPIDYGRTIAGTTEGHSGANPDAGAYEYGATAWKAGVTWDITKGAANRCYQLPGEVCFDDTDTGGDIGELPGKVEAENYAHYYDTTPGNIGGAYRNQDVDIQPTTDTLGGYNVGWINAGEWLEYDIDVTQAGRYDAELRVASKLGAGQVAIAIDGVARGEALTIQSTGDWQNWATLTTQLGYLEAGLHTLRVSAMSGGFNLNWYNFTKQVSFGETAVGFTNTPPTRIPATRHQSFSVDYVANEPRELFLLFFNPDWSWVASTKTTVEPGKASTTLQLNLPFVPTAVQAFNVKLENRPIGANWDNPNNVEAHAAVTTQAAPLQHNGGFENGGTSGWNGYGSHALSTEAHSGSYAGKVTGGPSAFSQTIPNLTPNTTYSLSAFVKARAGHTGFLGVKEYGGQETSLIVNSTHYQKKTITFTTGPNASSAKIYLYVRDNNHVAFIDELVIVKVY

SEQ ID NO: 202 - DNA, 3075 bp, Microbulbifer degradans
atgaaaaaaccacctagccgttacagtacgctggccataaccctgtgtatgagtttatcgcaggccgctatagcaaaggatatctacgtcgcccctacaggagatgacgctggagccggatcgtttagcagcccctatcaaacgctggcgaaagcggcacaaaccgcacaagctggtgatgtcgtttacctgcgcgaaggcacctatcaggaaacgcttcgcccagcgaattcaggcacagccagtcaccccattgtgtttcaatcctatcagaatgaaaaagtgatcatcagtgcaatggaagccttaagcggctggcagcaagacacctcaaatatttataaaaccacggtgaactgggatctaggccaagaaaattttgtgatgcataaatctacagcactggatttagcccgctggccaaacaataccgatgcagaccccttcacgttaaattctaaaagaaacacagggggaagtggccccgaggtaggccaaggtgcttatatagaatacgcagcaggattgcccaatattaattggactgggggtaccgtattttattatggcgataaacccggtggcggttggctagcgtggcgcgagacgattgtaagccacactcaaacccgtataaatatagacctttctaaaaagaatcccgcgtgggtacgcaccgcacacgacccggcaagcggcggagaattctatttaatgggcgtaaaaggtgctttagattatcagaacgaatggtacttcgattcaaatacgcgagagctttttgtccaactgcccaacggcgcgcgcccacaaaatggcgatattcaatttagaaaacgcctgcagaccattaacttggcaaatagaagccacatacacattaaaaacattgctgtttttggtggcgctatagaaataaccaataacgctaattctaacctgctttctggggtatccagtttttatggcaatgctacgctcggtgtacacaccggattttcggcgccaagctacagcgtaaaaattcaaggcagcgataaccgtatagaaaacagtgaaattgcctacggctccggtactgggatatacgacagcggcacccgcagccaaattgtgaataactacattcacgattttaatacccttggcgactacaacgcgccggttaacgcgcgcggcggaagtaatacgttagtaaaaaataatcgaatctcccgcggaggccgcgacaccatacaagcttttaatcgagacagcgaatggtcgtataacgatgtttcccacagtaatttaatagccgatgactgcggcttgttttacaccgttggcggaccacacaatgtggaaatccatcacaactggtttcacgacgcatattcacacggcaacaaaaacaaagccgctggtatttatttagataacgatgcccgaggttttaaagtacaccacaacgtggtgtggaacaccgagtggacaggcattcaaataaattggaacggcacggacatagacgtatttaacaacacattatggaacaacagtgccgctatgggagcatggcacaaagccgggactgcgttttcggatgttcgagtttggaacaacctctccaacagtaataagtgggaggagcaagccaataagcaaaacaaccttacgggaacaggcgatccgtttgtgaacagccaagccggagattttagattaaaagccaatacggcccctatcgactatggccgcactatagcgggtacaaccgaggggcacagtggcgccaacccagatgctggtgcgtatgaatacggcgcaaccgcttggaaagcaggcgtcacatgggatataaccaaaggcgcagccaaccgctgctatcaacttcccggtgaggtttgctttgatgacaccgataccggcggagacattggtgagctacccggtaaagtagaagccgaaaactacgcccactactacgacaccacccccggtaatattggcggcgcctaccgcaaccaagatgtagatattcagcccaccaccgatacactaggtggctacaacgtaggctggattaacgctggcgagtggttagaatacgacatcgatgtcactcaggcggggcgctatgatgccgagcttagagtagcctctaaactgggtgcgggccaagtagccatagccatagatggggtcgctagaggcgaagcgttaacgattcagtcgacgggcgattggcaaaattgggcaaccctaacaactcaactagggtatttagaagcagggctacatacgctgcgggtatccgctatgagcggtggcttcaatctaaattggtataacttcactaaacaagtaagctttggggaaaccgccgtaggcttcaccaacactcctcctacacgtataccagctacaaggcatcagagcttttctgtggattatgttgccaacgagccgcgagaactgttcttattatttttcaaccccgactggagttgggtagcctcgacaaaaacaaccgtagagcccggtaaagcttctaccacgttgcaattaaaccttccctttgtgccaaccgctgtgcaagcatttaacgttaaattagaaaatcgccccataggcgccaactgggataacccgaacaatgtcgaagcgcacgctgccgttaccacgcaagcagcaccgctacaacataacggtggcttcgaaaacggtggcacctcgggttggaatggatacggtagccatgcacttagcacagaagcccacagcggcagctatgcaggcaaagtaaccggtggcccctccgcgttttcgcaaactattcccaaccttaccccaaacaccacctacagcctctcggcttttgttaaagcacgcgctggtcacacggggtttttaggcgttaaagaatatggaggccaagaaacgagcctgatagtaaacagcacccactatcaaaagaaaaccatcaccttcaccaccggccccaacgccagctcggcaaaaatttatttatacgttagggataacaaccatgtggcgtttattgatgagttagtcattgtgaaagtgtactag

SEQ ID NO: 203 - protein, 912 aa, Microbulbifer degradans
MKKILFLALGLLISQASFAQQTISSLAEFIALQDGSNQNIKMAPGTYHISSSSKSLFPGGDWRANVEGNWPGLFKFSGNNNTFDLTGVTFTFDSTILLEMPNLVHANLMEFGGSGNVWKGLNIQEKPNSKGEYGAFIHTSGGTIAVFTGDNHKVSDFTLKTRFSRPYGLGSLYGKTGNSSSTLPGVRLSKKTAMFLISLDDSYFENVLIDHSGFGHTLAFNGVDNVVFNTVEIIAESRSTDDLYANGIGGTDRNGVPFNVLFNGDELIGTNFADADYFLNLFDTDNFNQCQNMSGGVQYSPIRKGYQYSLTEDSFRGYYSAGSLGNIEIYNATVTGSRAGVVMEYASEGMIVDGMTVRGIAGHGVPACDGAWNSANGGEGDASAYGPPSNSVLKRAKADAAYSTVLEIPNFVDNVTADIEVLDPLNGYNRPSASNALALIKGDDHDIRLWKRDNQALTRDLVVKVSDADNLLLCNMTKQGVTVASSVTNSTIYSVGSISNSSGSSNTVVKLSSAADEPAICKALETNEVITDCGDFDAFAGIQAEAYCDMAGVEIESSSDDGGEQVGYINNNEWIAFNDVDFGNGASGFEARVSSATSGGNIELRLDSQTGALIGTCSVNGTGSWTTYETVSCDIGGVSGVQDLYLVFTGNSGYLMNVNWFNFTQAATNCSLPWSDSDFSVEKEIVNYSSGAIDISCASNVEISMNLEGVGAMEDADYLNVYYRVDGGAQQVISENVNAFSEKTVSVSGINGSSLEIIANVYTSYGAEIYTISDMSVKADSQTAYSLEVVSVLASADDGNVPANTRDGDLGTRWSANGDSQWITYDLGSSKTVTDVGIAFFRGDQRTAFISIETSTNNSTWQTVYSDEQSSSTTEIQNFDVTDSNARYVRIIGYGNSVNNWNSFTEVEIIGR

SEQ ID NO: 204 - DNA, 2739 bp, Microbulbifer degradans
atgaaaaaaatcctgtttttggccttaggccttttaataagtcaggcttcgtttgcccagcagacgatttcaagccttgccgagtttattgctcttcaagatggcagcaatcaaaacataaaaatggcccccggcacctatcatatatcatcatcgtctaaatcactgttccccggtggggattggcgggcgaacgtcgaaggtaattggccgggcctgtttaagtttagtggcaacaataatacgtttgacctgaccggcgttaccttcaccttcgactccacgatcttgttagaaatgcctaatcttgttcacgcaaacctcatggagtttgggggttccggtaacgtttggaaggggctgaatattcaggagaagcccaacagtaagggcgagtacggcgcttttattcatacctctggcggcaccatcgctgtattcactggggataatcacaaagtttctgattttactttaaagacacgtttttctcggccctatggtttaggttctctctatggaaaaacgggtaactcgtctagcacgctgcccggcgttcgcctgtccaagaaaacggccatgtttcttattagtttagatgatagttactttgaaaatgttctgattgatcacagtggctttggtcatacgcttgcctttaacggtgtcgataacgtggtattcaataccgttgaaatcatcgcagaatctcgctctaccgatgatttgtatgctaacggcattggcggaacagaccgcaatggtgtgccttttaacgtcctctttaatggcgatgaactcataggaacgaattttgccgatgccgattactttcttaacctgtttgatacggataacttcaatcagtgtcaaaacatgagcggtggcgtgcaatattcgcccatccgaaaaggttaccaatatagcctgactgaagattcgtttcgcgggtactacagtgctggttcccttggcaatatcgagatttataacgccaccgttacgggttcaagagcgggcgtcgtcatggaatatgcgagcgagggtatgattgtagacggtatgacggttagaggtattgccgggcatggcgtgccagcgtgcgacggcgcgtggaattcagctaacggtggtgaaggcgatgcttccgcctatggtcctccatcaaacagtgtacttaagcgtgcgaaagccgatgccgcctattccactgttttagaaatccccaattttgtcgataacgtgacggccgatattgaagtgttggacccgttaaacggttacaaccgtccttcggcatcaaacgctttggcgcttattaaaggtgatgatcacgatattcgactttggaaacgtgataaccaagccttaacccgtgacttggtggttaaggtgagtgatgcggataatctattgctctgtaacatgacaaaacaaggcgtgactgtcgccagcagcgtgaccaactccaccatttattctgttggtagcatcagtaattcaagtggcagttctaacacggtggtaaaactgtcaagcgcagctgacgagccagcgatatgtaaagctcttgagactaacgaagttataacggattgcggtgattttgatgcattcgccggtatccaagccgaagcctactgcgatatggctggcgttgaaattgaatcctccagcgatgacggtggcgaacaggttggttacattaacaacaacgaatggattgcattcaacgatgttgattttggcaatggcgcaagcggttttgaagcgcgcgttagtagtgctacctccggtggcaatattgagcttcgtttagacagccaaacaggcgcgttaattggcacgtgctctgttaatggaacgggcagttggacgacctatgaaacggtttcttgcgatatcggtggcgtcagcggcgtgcaggatttgtacctcgtgtttaccggaaatagtggctatttaatgaatgttaattggtttaacttcacgcaagctgcaacgaattgttctctgccttggagtgacagtgacttcagcgttgaaaaagaaatagttaactacagttccggtgctattgatatttcatgtgcttccaacgttgaaatttccatgaatctagaaggtgtaggcgccatggaagatgccgattacttgaacgtttattaccgcgttgatggcggtgcccaacaagtgatatctgaaaatgtgaatgcgttttctgaaaaaaccgtatcggtatcaggtatcaatggcagtagcttagaaattatcgccaatgtttataccagctatggcgcagagatttatacgatttctgatatgagtgttaaagctgattcgcaaacagcttattctctagaggttgtttctgtcttagccagtgcggacgatggcaatgtgcctgccaatacccgtgatggcgacctgggtacacgctggtcggctaatggtgattcgcagtggattacctatgatcttggcagcagtaaaactgtgaccgatgtgggcatcgccttttttagaggcgaccaacgcacggcatttatcagcatcgaaacctcaaccaataatagtacctggcaaaccgtttattctgatgagcagtcaagcagcacaacagagattcaaaattttgatgtgaccgatagcaatgctcgctatgtaagaattattggctacggaaatagcgtaaataactggaacagttttacggaggtcgagattattggtcgttaa

SEQ ID NO: 205 - protein, 541 aa, Microbulbifer degradans
LALSASLTQAATISNSGFESGFDGWTDTDPSALSSDANNGSRSAKITGSAGRVDQDVAVTPNTNYQLTAYVLGSGRVGVNTGTAVYDEAVNTSSWSKVTVNFNSGSANSVEVFGKYNSGTGRFDDFSLVETGTPTPTPTPTPTPTPTPAGCNSLNTIDISSATDDGSHDGHGPHLAVDGDLSADSRWSSKGDGKAITLDLGAEATVRQLKTAWYKGDSRTAYFDVETSTDKSNWSTALSNVQSQGSTGLKSNSIDDVTARYVRIVGHGNSSNTWNSLIEAQVLGCAGTVTPTPTPTPTPTPTPTPTPTPTPSGSKIPESITNSDVWDLEGENPHPLVDPYTLEFVPLEARVTTPNGNGWRHEYKIASSERTAMTATYEDFSATIKVDLSTGGKTIVAQHHAGDTGTIMKLYVSDTSESGFFDSVAANGIFDVYVRIRNTSGVEEKKPLGTIRSGDSFSFHVLNNYGVVKVSAFGKNLETEVEDDSASYLKFGNYLQSQYPQGSKDCGSHGDSDSFRACYEDIGITEAKITMTNVSYTRITK

SEQ ID NO: 206 - DNA, 1626 bp, Microbulbifer degradans
ctcgcgcttagtgcatctttaacacaggctgcgaccatttctaactcaggcttcgaaagtggctttgacggttggacagacactgacccttcggcactttctagcgatgcaaataacggcagccgatctgccaaaattactggctccgccggccgtgtagatcaagacgttgcggtaaccccaaacaccaactaccagttaactgcatatgtacttggcagtggacgcgtgggtgttaacaccggcactgcagtttatgacgaagccgtaaacacaagcagctggagcaaagtaactgttaactttaactctggctctgcaaactctgtagaagtgtttggtaagtacaatagtggtactggccgctttgacgatttcagcttagttgagacgggaacaccgactcctacgccaacacctactcctacgcccacgcctacaccagcgggctgtaacagcttaaataccatcgacattagctctgctaccgatgatggctctcacgatggtcacggcccacacctagctgtggacggcgatttatcagctgattcacgctggtcttctaaaggcgacggcaaagcgattactttagacttaggcgccgaagccacagttcgtcaactaaaaacggcttggtacaaaggtgactcacgtaccgcttacttcgatgtagaaacgtctaccgataagagcaactggtctaccgctttaagcaacgtgcagtcacaaggtagcactggccttaaatcaaacagcattgacgacgtaacagcgcgttacgtacgtattgttggtcacggtaactcgtcgaatacttggaacagcttgattgaagcacaagtattgggttgtgctggcactgtaacgccaacacctactcctacgcctacaccaactccgaccccaacgcctactcctacgccaactccatctggctcaaaaattcctgaaagcattacaaacagcgatgtttgggatttggaaggcgagaacccacacccattggtagacccttacacgttggaattcgtacctcttgaagcacgcgtaacgactccaaacggtaacggctggcgccacgagtacaaaatcgcttctagcgagcgtactgcgatgactgctacctacgaagatttctctgcaactattaaagtagacctatctactggcggtaagacaattgttgcacagcatcacgcaggcgacactggcaccatcatgaaactatacgtttccgacacaagcgaatctggctttttcgatagcgtagcggcaaacggcattttcgacgtgtatgttcgtattcgtaacaccagcggtgttgaagagaagaaaccattgggcacaatccgctctggcgactctttcagcttccacgtacttaacaactacggcgttgtaaaagtatctgcctttggtaaaaacctagagacagaagtagaagacgattctgcatcttacttgaagtttggtaactacctacaatcgcaatacccacaaggtagcaaagattgtggttcacatggcgactccgattcgttccgtgcctgctacgaagatataggcattaccgaagcgaaaatcaccatgactaacgtttcttacacgcgtatcactaagtaa

SEQ ID NO: 207 - protein, 1033 aa, Microbulbifer degradans
MGEAPVKKQAYTTTPVKPNALGLAIRTLALGGLAAGLVNVAHADLLSVNKTATASSEMQAAAYAFDNNQNTRWESAHAVDPTSISVDLGETYDLDSIVVHWEAANAASYTIEGSDNGVNWTQIGTYTGGTFGNRTDTVNVDGNYRHVRLNGTQRSDGNAWGYSIWELEVHGTEVTEPPVVEPPTEPGENLAIYGTATASSGNADVAIDNNAGTRWESDHGIDPSSFTLDLGATYSLNQVVIDWEAANAKVYAIQGSNDGTNFTTLANYSGGEFGTRTDTLNIAGDYRYVRLLGTERSDGNAWGYSIWEFKVYGGGKTEPPVTEPPVTEPPVVEPPIFTDLNYQPLFNNTHSPDTAQEWYTKPDGTVVTIASGRARSRHESEDIFYTFPTHYFEHRTFEIEIHDHTPKGQNLVEVFYHPEYANYVPPGCRSSYSNVWRADFNNNAGMDEKLQTATPDGKGERWVCRIQRDAHNGDDGILDVGSWMEFELQQFLGLYEGDPNVRGQAVYYTDTYRFKLGQPGIYIVGDEAMEEKIRAGGRATAPYVKGGDSVPVNEVISVNGDNTLTYKVMANGKWTQKDNPNGTVVTFPIRDGIEVYDNYVVASGVADWTTYFREALNIQWDTHNAFMQGRRVFHTRMDTGVHEEVGNPDFPELANIADGLMVKNSCLGCHVNNGRGIAPQNGALLDTLVVKVGSGAFDNLGQPQPHSYYGGVLQNLSLDAAVPAEGSVRVTYTAQNGTFNDGTGYSLQVPTYSLEMNDTNGGAIQHISPRMPQNITGLGLLEALPENEILAWHDPDDSNGDGISGRANVVTSPETGQQFIGRFGWKASSASLRDFAATALSGDMGVNTSVLPNADCGAQQTACIQNSGQGVELSDLRLNELVVYLQALGAPSRRPETVDQPMVVAGEQRFTDIGCASCHRPEMNTGHKHDLAELRGNVIRPYTDMLLHDMGPGLADSLTQAPELNREWRTAPLWGLGMNLAVNGHDNLLHDGRARSIEEAILWHGGEAQASNNAYKALSAQQRAELIAFLRSL

SEQ ID NO: 208 - DNA, 3102 bp, Microbulbifer degradans
gtgggagaagcacctgtgaaaaaacaagcttatacaactacaccagttaaaccaaatgcgttaggtttagccattcgcacactggcccttggtggcctagctgcgggacttgtaaacgtagcgcatgcagatttattgtcggtaaataaaactgctacggccagcagtgaaatgcaagctgcagcttacgcattcgataacaatcaaaatacgcgctgggaaagtgcgcacgcggttgatccaaccagcataagtgtagacttgggcgaaacctacgatttagatagcattgtcgttcactgggaagctgccaacgctgcaagctacaccatagagggctccgataacggtgttaactggacgcaaataggcacctataccggtggtacctttggcaatagaaccgataccgtaaacgtagatggtaattaccgtcacgtgcgattaaatggtactcagcgcagcgatggcaatgcatggggttactccatatgggagctggaagttcacgggacagaagtaaccgaaccacctgtagtggaacctcctacagagcctggcgagaatttggcaatatatggcacggcaaccgccagctctggtaacgccgatgtagctattgataataacgctggtacgcgctgggagagtgaccacggcatcgacccttctagttttactttagacctaggcgcaacctacagcttgaaccaagtggttatagattgggaggccgccaacgccaaggtgtatgctatccaaggctctaacgatggcactaactttactacccttgctaattacagcggcggtgaattcggcacgcgtaccgatacattaaatattgctggtgattatcgctatgtacgcctgttgggtactgagcgcagcgatggcaacgcatggggctattctatttgggaatttaaagtatatggcggtggaaaaactgagccaccggttaccgagccacctgtgacagaaccgccagtggtagagccccccatttttaccgacctaaattatcagccactgtttaacaacacacacagcccagatactgcgcaagagtggtacaccaagcccgacggtacagtggtaacaattgcaagtggccgcgcgcgttcacgtcacgaatcggaagatattttttacactttcccaacgcattattttgagcaccgtacatttgaaatagaaattcacgaccatacccctaagggccaaaatttggtggaggttttctaccacccagaatacgccaactatgtgccgccgggttgtcgctcttcttacagcaatgtttggcgtgcagactttaacaacaacgccggcatggatgaaaaactgcaaaccgccaccccagacggtaaaggtgagcgttgggtatgccgcatacagcgcgacgcgcacaatggcgacgacggcattttagatgtgggttcatggatggagtttgaattacaacaattcttaggcttatatgaaggcgaccctaatgtgcgtggccaggccgtttactacaccgatacataccgttttaaattaggccagcccggtatttatattgtgggcgatgaagccatggaggaaaaaattcgtgcgggtggccgcgctacagcgccttatgtaaaaggcggcgactcggtacctgttaacgaagttatttcggttaatggcgacaacacacttacctacaaagtaatggcaaatggtaagtggacgcaaaaagataaccccaacggcactgtagttactttccctattcgcgatggcattgaggtatacgataactacgtagtggcgagtggcgtggccgattggaccacctatttccgcgaagcgttaaatattcagtgggatacgcacaacgcatttatgcaggggcggcgcgtgtttcatacgcgtatggataccggcgtacacgaagaagtgggtaacccagactttcccgaattggcaaatattgccgatggtttaatggtgaaaaattcgtgcttgggttgtcatgtaaacaacggccgcggtattgctccgcaaaacggcgcgttattagatacgctagtcgttaaagtaggctcgggtgcgttcgataaccttggccagccacaaccacacagttattacggtggtgtactgcaaaacctatcactagatgctgctgtgcctgcagagggttcggttcgtgtaacttacaccgcgcaaaacggaacctttaacgacggcacaggctacagcttgcaagtgcctacctattcgttagaaatgaacgataccaacggcggggctattcagcatatttcaccgcgcatgccacaaaacataactggtttaggcttattagaagccttacccgaaaatgaaattttggcatggcacgacccagatgatagcaatggcgatggtatttctggccgcgctaatgttgttacctcaccagaaacggggcaacagtttataggtcgctttggctggaaagcgtcatcagcaagtttgcgtgattttgctgcaacggctttaagtggcgatatgggtgtaaatacctctgtgttacccaatgcagattgtggcgcacaacaaaccgcctgtattcaaaatagcggtcagggcgtagagctaagcgacctgcgtttgaatgaactggtggtttacttgcaagcgctgggcgcgccttcgcgcaggccagaaactgtagaccagccaatggtagtggccggtgagcagcgttttaccgatataggctgtgcctcgtgtcaccgaccagaaatgaacaccggtcataagcacgatttagctgagttgcgtggcaacgttattcgcccctataccgatatgctgttacacgatatgggcccaggtttggcagatagcttaactcaagcgccagagctaaatcgcgaatggcgtacagcgccgctgtggggcttgggcatgaacttggctgtaaacggtcacgacaacttgctccacgatggtcgcgcacgcagtattgaagaagccattttatggcacggtggggaagcgcaagccagtaataatgcctataaagcactaagtgcgcagcagcgagcagagttaatagcgtttttacgctcactctaa

SEQ ID NO: 209 - protein, 557 aa, Microbulbifer degradans
MLHISVQPNLTRSISGFLLGLAGVVSGSAYAQWNPAPNWEDSYSVNGVCYCNSSNYDHGLSAKTAPTPIGELNVVDICTDIKAVLGEGATNGRIPFNDIQCGNGPANDAADEAGCPGRVDIGSAGCDVIGPKWDLVSVYGPWPDGGLNRDAWEVSASNGSGSAQLALDGLASTRWATGVFQSPGQYFDIDFQDALTFDSIVLATTENPEDYPRAYEVYISSNGSDWGVPVVTGAGNGSTTTIELDTVTTRYLRILQTGSSSNRWWSIHEFNIFNSGPIPPEPEYPALDRSDWTVSASVNGAEAEFAIDSSPNTRWDTAQSQRAGQSFEVDLGELNTLAAIELDSAGSANDYPRGYAVYVSNDGSNWGSAIASGAAVSASTTIEFTPVSARFVKIEQTGGDGHYWWSIHNLNIFGEPSDNPQPTIELLDSTPWSLAANRRNSAAGNAIDNNQSTRWTTGQTQRDGQTFEIDLSTVQTFSRIVLDSAASDDDHPRNYELYVSNDGSNWGSPVATGAGDSSGVTVIDFPSVTARYVLIAQAGSDSSHWWSIHELSIYNVQ

SEQ ID NO: 210 - DNA, 1674 bp, Microbulbifer degradans
atgctacacatctctgttcaaccaaatcttacccgctctatttctgggttcttgttgggcctagcgggcgttgtctcgggctcggcttacgcgcagtggaacccagcacccaactgggaggacagctattctgtgaatggagtttgctactgtaattccagtaattatgatcatgggctaagcgccaaaacagcacctactcccattggcgagcttaacgttgtcgatatatgtaccgacatcaaagccgtgcttggtgagggggcaacgaatggacgtattccatttaacgacattcagtgtggtaacgggcccgccaacgatgctgccgatgaagcggggtgcccaggccgagtggatattggctcggcagggtgtgatgtgattgggcctaaatgggatttggttagcgtttacgggccatggccagatggcgggcttaatagggatgcttgggaagtgagtgcctcaaacggttctggtagcgcgcaactggcgcttgatggcttggcgagtacgcgctgggcgacgggtgtgtttcaatcgccaggtcagtattttgatattgattttcaagacgcgctaactttcgattcaatagtacttgctaccaccgagaacccagaagattacccaagggcttacgaggtttacatttcatcaaatggcagcgactggggagtaccagtggtgacgggagccggtaacggctccactacaactatcgagctagatactgttaccactcgctacttaagaattttacaaaccggcagctcatctaaccgttggtggtccattcatgaatttaacatattcaattctgggccaattccgccagagccagagtacccggcattagatagaagtgactggacagtttctgcatcggtaaatggcgcagaagccgaattcgctatcgactcttcacccaatacgcggtgggatacagcacaaagccaacgagcagggcagagttttgaggtagatttaggagaactcaacacgctagcggccattgagctggattcagcaggcagtgccaatgactatccgcggggttacgccgtttatgtatcgaacgatggctcaaactgggggagcgctatcgcttctggcgctgcagtaagcgcgtccacaacaatagaatttactccagtaagcgctcgcttcgttaaaatagagcagacgggaggtgacggacactattggtggtctatacacaacttaaatatttttggtgagccttcagataacccacaaccgactatagagctactcgatagcactccctggtctctagccgcgaacaggcgaaatagcgcggctggcaatgccatagataataaccagtctacacgatggaccacgggccagacccagcgcgatggtcagacgttcgaaattgacctgagcactgtgcaaacctttagccgtattgttttagattccgcagcgagtgacgatgatcaccctcgcaattatgaactttatgtctctaacgatggttctaattggggcagcccagtggcaaccggtgcaggagatagtagcggagtaacggtaatagatttccccagcgtgaccgctcgctatgtacttatagctcaggctggctcggatagctcacactggtggtccattcacgagttgagtatttacaacgtacaataa

SEQ ID NO: 211 - protein, 674 aa, Microbulbifer degradans
MKIIRLLVLCLGVVSSVVAVASSSEPHDEGNALESALWDTLTIPVCWENPEAFPVEEQAWVRKAVERTWEQESLVRFTGWGECGANDDGIRILVDDVGPHVKQLGSRLDGYVNGMVLNHTFQNWGTSCSYRRQYCAEVIAVHEFGHALGFAHEQNRDDTDDMCAAEAQGTDGDIYVGAWDLDSVLNYCNPEWNGAGNLSDTDIEMVQLFYGQPIETSGNEPVAICSVSASSSDGNIAENTLDGDYATRWSANGDGEWIQFNLCESQVADRVELAWYKGDTRSSTFSIEYITTDGYVWYTTPVRRYSSGASLGLESASFTAAEIQSLRITGYGNSSNTWNSITEAVIYTPSAGLDYPNLVAPTDVAATVTGQSQITISWADTNSEEESYFVEARIGGNDFFAIGLTEANATSYTHTDLIAEGLYEYRVTAVSGIIRSNFAAASVYFQPAGGSQANLVRPENFTVTANAQGQIALSWVDVSEGEEGYTLEYKLSSEAEFTVIELAANADSAIVSDLAAGSYYFRVSSYFGNNASEYSELLVTVFASEATIVPVDVYASSDDGNVASNVFDNDYSTRWSAFGVGENLTIALGDNYLVTDMRIAWYKGDQRQTRFQVEVSDDNQTWVQVFDGINSGESLSLETTFGGDYRASYIRIIGLGNEFNNWNSITEVSIKGHL

SEQ ID NO: 212 - DNA, 2025 bp, Microbulbifer degradans
gtgaaaatcatacggttgcttgttttgtgtttgggggtagtaagttctgtggttgcggtagctagtagctcagagccacatgatgaaggtaatgcattagagagtgcattgtgggatacgttaactattcctgtgtgctgggagaatccagaggcttttcctgtagaagagcaagcttgggtaagaaaagcggttgagcgtacttgggagcaggagtcattagtccgcttcaccggttggggcgagtgtggggcgaacgatgatgggatacgtattttagtggatgatgttgggccgcatgttaagcagctaggctcgcgtttggatggctatgttaatggcatggtactaaaccatacattccaaaattggggcaccagctgcagttaccgtcgtcaatattgtgcagaagtgattgcagttcatgagtttggtcatgctctaggctttgcccatgaacaaaacagagatgacaccgatgatatgtgcgcggccgaggcgcagggtactgacggcgacatttatgtcggcgcctgggacttggattcggttttaaactattgcaaccctgagtggaatggcgcgggcaatctaagcgataccgatatagagatggttcagctgttttacggtcagcccattgaaacgtctggtaacgagcctgtagctatttgtagtgttagcgccagttcaagcgatggcaatattgcagaaaatacgctagacggcgattacgctacgcgttggtctgcaaacggcgacggcgagtggatacaatttaatttgtgtgaaagccaagtcgcggatcgtgtcgagttagcttggtataagggagatactcgctcaagtaccttctctattgagtatataactaccgatggttacgtttggtataccacgcctgttcgtcgatattcttccggtgcttcgctaggcttggaatctgcgtcatttactgcagctgaaattcagtccttgcgtattactggctacggcaactcgtctaacacttggaatagtattaccgaagcggtaatttatactccaagcgctgggctagattaccctaacttagttgcacctacagatgtggcggctacggtaacagggcaatcgcaaattactatttcatgggcagatactaatagcgaagaagaaagctattttgttgaggcgcgtattggtggcaacgattttttcgctataggtcttactgaggcgaacgcaacatcttatacgcataccgaccttattgctgaaggcctttacgagtatcgtgttactgccgtaagcggcattattcgctcaaactttgcagctgcaagtgtatattttcaacctgcaggcggctcgcaggctaatcttgtgcgcccagaaaacttcactgtaacagctaatgcgcaagggcaaatagcactaagttgggtggatgtaagtgaaggcgaagagggttataccttagagtataagcttagtagtgaagctgaatttactgtaattgagctagctgcgaatgccgattctgcaattgttagcgatttggctgcgggtagttactattttcgtgtaagcagttatttcggcaacaatgcttctgaatacagcgagcttttggttactgtgtttgcatcagaagcgactattgtgccggttgatgtttatgcatctagtgatgatggcaatgtggcaagcaatgtttttgataatgattactctacgcgatggtcggcttttggtgtaggtgagaatttaaccattgcgctgggggataattatctcgttaccgatatgcgcatagcgtggtacaaaggtgatcaacgtcaaacccgctttcaggtagaggtgagtgatgataaccaaacctgggtgcaagtgtttgatgggattaactcgggtgagtcgttaagtttagagacgacgtttggcggtgattatcgcgcaagctatattcgaattatcggtttgggtaatgagtttaataactggaacagtattactgaggtaagcattaaagggcacctctag

SEQ ID NO: 213 - protein, 818 aa, Microbulbifer degradans
MIKLSHLKHCRKFCISLLCALGMANAHAALNVTASADDGNVPANTLDDNIDTRWSANGSGQWIEYDLGATHTVDAVQIAFFRGDVRDATIDIQVSNDGGNWQTLFSGTPPTRTLAQQHFELDDTSARYVRIVGYGNSQNNWNSITEFDVVTLASGENIALGKATSQSSTGYEGVSSRAVDGNTNGNWNQGSITHTNNEYQPWWQVDLGSVRSIDQVNLWNRTNCCSSRLSAFYVLVSDVPFTSQTLSGALSQAGVSAYYFNDTAGSPTEINIDRTGRYVRVQLSGTNPLSLAEVEVIEGSEIVPPAPTGPDASWTYCAAEREQCAFSNIKEVAYGAGDSWNYSVELDGVTCNNTNLGDPVRGTVKSCWVRNAQQNYVAVRNLAELQNAISNSNQHIRMKRGVYEATALMSDNTTVFRFDGANNVLDFTGVTIQVPTKLLNSMSTQPIHSQVTYDVMGDNITFLNGTFENTYPNGQHDVTDFTAHNKNPDYWPARQMTEFRVWGNGVQFLNNTITVRGSYPYGYGDMLGKGAGSAVYLRKHAGVQISGDNVLIDGMKLTVLAFGHGIFMQGADNTVIKNSVVQGRMRLGADMYNDGPDSLMGPFNFEQQYPDHFVGLPIVRDLMYNLTEDGIRAYTQGTKLDGSVVRTGAITVEDTKVINMRGCITTPLASKPSYIKNVEIQGCSVGYALANNSDVINSRGDAGYGPLLHSTYDTRNNANVEITVTNIPSTGSHAFAYIAGSGHNITFLSDGSNPDVPREIRVGDTGDRWAGDPSYQDAANILLINETNQPVVLTETSRNITGESVGEVTDNGTGNSLK

SEQ ID NO: 214 - DNA, 2457 bp, Microbulbifer degradans
atgataaaactatctcacctcaaacactgcaggaaattttgtatttctttgctttgcgcgctgggcatggctaatgctcacgccgcattaaatgtaactgcatctgcggatgacggcaatgtgcccgcgaataccttagatgacaatatagatacgcgctggtcggcgaatggatctgggcagtggattgaatatgatttgggcgcgacacacactgtggatgctgtgcaaatagcattttttcgcggagatgtgcgcgatgcaaccatcgacattcaagtgtcgaacgatggcggcaattggcaaacacttttttcgggtacgccaccaacccgaaccttagcgcagcaacattttgagttggatgatacttctgcgcgctatgtgcgtattgtaggttatggtaacagccaaaataattggaacagtattaccgagttcgatgtggttacgcttgcaagtggagaaaatattgctcttggtaaagctacatcccaatcatccactggctatgagggtgtatctagccgtgcggtagatggcaacaccaatggtaactggaatcaaggctcgattacccacaccaataacgagtatcaaccttggtggcaagtggatctaggctcagttagatctatcgaccaagttaacttgtggaatcgtaccaactgctgcagctcgcgtttatcggcgttttatgtgttggtgtccgatgtgccctttacatcgcaaaccttaagcggtgcgcttagtcaagcgggtgtaagtgcttattattttaatgatactgcgggcagcccaaccgaaataaatatagatcgcacaggtcgctatgtgcgtgtacaactttctggcacaaacccattaagcctagcggaagttgaagttattgaaggcagcgaaattgttccaccagcaccaaccggcccagatgcatcatggacttattgtgccgccgagcgcgagcaatgtgcattttctaatataaaagaagtggcctacggcgctggcgatagctggaactactctgtcgagctagacggcgtaacttgtaataatactaacttgggtgaccccgttcgcggcacggttaaatcgtgctgggtacgcaacgcacaacaaaattatgtggcggtgcgaaaccttgctgaattgcaaaatgctatttccaatagcaatcaacacattcgcatgaagcgcggtgtgtatgaagctacagcgttaatgtctgataacaccaccgtatttcgattcgacggtgcgaataatgtattggattttaccggtgtaaccattcaggtacccactaaactcttaaacagtatgagtacccagcctattcactcgcaagtaacctacgatgtgatgggcgataacattacttttttaaacggtactttcgaaaatacctatccgaatggccagcacgatgtaacagattttaccgcccataataaaaacccagactattggcccgcgcgtcaaatgacggagtttagagtgtgggggaacggcgtacagtttttaaataacaccattactgtgcgcggttcatacccgtatggctacggtgatatgttaggtaagggcgccggttctgcagtgtatttacgcaaacatgctggtgtacaaatttctggcgacaatgtattaattgacggcatgaaattaaccgtacttgcattcggccacggcatttttatgcagggtgcagataacacagtaattaaaaactctgttgtacaagggcgtatgcgcttaggcgccgatatgtataacgacgggccagactccttaatggggccgtttaattttgagcagcaatacccagatcactttgtgggcctgccaattgtgcgcgacctaatgtacaaccttaccgaagatggcatacgcgcttatacacaaggcaccaaattagatggtagtgtggtgcgtactggtgcaattactgtagaagacaccaaagtaattaatatgcgcggttgtattactacgccattggcttctaagccaagttatataaaaaatgtagaaattcaaggttgtagtgtgggttacgcgctggcgaataatagcgatgtaatcaattcgcgcggtgatgcaggctacggtccgctattgcactctacgtacgatacgcgcaacaacgccaatgtcgaaataaccgttaccaatattccatctaccggctcacacgcttttgcgtatattgcaggctctggtcataacattaccttcctaagtgatggcagcaacccagatgtgccgcgcgaaatacgcgtaggcgatactggcgaccgctgggctggcgacccaagctatcaagatgcagcaaatatattactcataaacgaaaccaaccaaccggtggtgttaactgaaaccagtagaaatattactggtgaaagtgtgggtgaggtgactgataatgggacgggaaatagcttgaaatag

SEQ ID NO: 215 - DNA, 31 bp, Artificial Sequence
  chemically synthesized primer sequence
cccggatcccatgcaaagcactgcagcggta

SEQ ID NO: 216 - DNA, 31 bp, Artificial Sequence
  chemically synthesized primer sequence
ccgaattccacggtgcttgtgctgcgtattc

SEQ ID NO: 217 - DNA, 31 bp, Artificial Sequence
  chemically synthesized primer sequence
cccggatcctggtggcgatgctttagcgtgc

SEQ ID NO: 218 - DNA, 31 bp, Artificial Sequence
  chemically synthesized primer sequence
ccgaattcatcgggtttggcgccactaatac

SEQ ID NO: 219 - DNA, 31 bp, Artificial Sequence
  chemically synthesized primer sequence
cccggatcccgaagcgctttacccaagctac

SEQ ID NO: 220 - DNA, 28 bp, Artificial Sequence
  chemically synthesized primer sequence
ccgaattcccttccataatggcatctag

SEQ ID NO: 221 - DNA, 31 bp, Artificial Sequence
  chemically synthesized primer sequence
cccggatccatcaagctctagttcgtcgtct

SEQ ID NO: 222 - DNA, 28 bp, Artificial Sequence
  chemically synthesized primer sequence
ccgaattcccggcattgataattgcgtt

SEQ ID NO: 223 - DNA, 28 bp, Artificial Sequence
  chemically synthesized primer sequence
gcgaattcaacgcggtatttctaggtcc

SEQ ID NO: 224 - DNA, 35 bp, Artificial Sequence
  chemically synthesized primer sequence
cgcaagcttcgtccaaataggtacttggttctagc

SEQ ID NO: 225 - DNA, 31 bp, Artificial Sequence
  chemically synthesized primer sequence
cccggatcctgcaaataacagcgccccatca

SEQ ID NO: 226 - DNA, 31 bp, Artificial Sequence
  chemically synthesized primer sequence
ccgaattcccagcttctagcataacctgttt

SEQ ID NO: 227 - DNA, 31 bp, Artificial Sequence
  chemically synthesized primer sequence
cccggatcccgtagcgccgttaaccgtagat

SEQ ID NO: 228 - DNA, 28 bp, Artificial Sequence
  chemically synthesized primer sequence
ccgaattcgatgagcttgaggaggaact

SEQ ID NO: 229 - DNA, 31 bp, Artificial Sequence
  chemically synthesized primer sequence
cccggatccaattcttagcggtggccagcaa

SEQ ID NO: 230 - DNA, 33 bp, Artificial Sequence
  chemically synthesized primer sequence
cccgctcgagccagctaccaaattgcagggtgt

SEQ ID NO: 231 - DNA, 30 bp, Artificial Sequence
  chemically synthesized primer sequence
ccggatcctggtggtggagtattccgcgta

SEQ ID NO: 232 - DNA, 30 bp, Artificial Sequence
  chemically synthesized primer sequence
ccgaattccgagaatcgaagtctaaccaac

SEQ ID NO: 233 - DNA, 31 bp, Artificial Sequence
  chemically synthesized primer sequence
cccggatcccgtgccagcaatgtccgtacaa

SEQ ID NO: 234 - DNA, 31 bp, Artificial Sequence
  chemically synthesized primer sequence
ccgaattcccgaagccaccactagtaatacc

SEQ ID NO: 235 - DNA, 30 bp, Artificial Sequence
  chemically synthesized primer sequence
cccgcggatcctgctaagccggaggaaacc

SEQ ID NO: 236 - DNA, 30 bp, Artificial Sequence
  chemically synthesized primer sequence
ccggggtaccataagcacgaactttaacgt

SEQ ID NO: 237 - DNA, 29 bp, Artificial Sequence
  chemically synthesized primer sequence
gctctagaaaggcgcattgcgccaactat

SEQ ID NO: 238 - DNA, 32 bp, Artificial Sequence
  chemically synthesized primer sequence
tccccccgggactgactagaacccaccatctt

SEQ ID NO: 239 - DNA, 31 bp, Artificial Sequence; identical to SEQ ID NO: 229
  chemically synthesized primer sequence

SEQ ID NO: 240 - DNA, 33 bp, Artificial Sequence; identical to SEQ ID NO: 230
  chemically synthesized primer sequence

SEQ ID NO: 241 - DNA, 34 bp, Artificial Sequence
  chemically synthesized primer sequence
ctagtctagaaactttaagaaggagatataccat

SEQ ID NO: 242 - DNA, 34 bp, Artificial Sequence
  chemically synthesized primer sequence
tccccccgggatctcagtggtggtggtggtggtg
